(19) United States
(12) Patent Application Publication
(10) Pub. No.: US 2026/0209369 A1
(43) Pub. Date: Jul. 23, 2026

(54) ANTI-TL1A x ANTI-IL23 ANTIBODIES

(71) Applicant: Xencor, Inc., Pasadena, CA (US)

(72) Inventors: James Ernst, Pasadena, CA (US); Matthew S. Faber, Glendora, CA (US); Gregory Moore, Azusa, CA (US); Kendra N. Avery, Hawthorne, CA (US); Juan Diaz, Anaheim Hills, CA (US); Peter Donghyun Nam, Monterey Park, CA (US); Jitendra Kanodia, Foster City, CA (US); Viralkumar Rameshkumar Davra, Chino, CA (US); James Scott Wieler, Pasadena, CA (US); Jing Qi, Arcadia, CA (US); Chi Nguyen, Garden Grove, CA (US); Thuy B. Truong, Baldwin Park, CA (US); Su-Shin Hao, Pasadena, CA (US)

(21) Appl. No.: 19/323,363

(22) Filed: Sep. 9, 2025

Related U.S. Application Data
(60) Provisional application No. 63/692,669, filed on Sep. 9, 2024.
(60) Provisional application No. 63/761,754, filed on Feb. 21, 2025.
(60) Provisional application No. 63/796,313, filed on Apr. 28, 2025.

(51) Int. Cl. C07K 16/28; A61K 39/00; A61K 39/395; C07K 16/24

(52) U.S. Cl. CPC C07K 16/2875; A61K 39/3955; C07K 16/244; A61K 2039/505; C07K 2317/24; C07K 2317/31; C07K 2317/35; C07K 2317/52; C07K 2317/55; C07K 2317/565; C07K 2317/622; C07K 2317/76; C07K 2317/92; C07K 2317/94

(57) ABSTRACT

Provided herein are novel anti-TL1A antibodies, anti-IL23 antibodies, and anti-TL1A×anti-IL23 antibodies and methods of using such antibodies for the treatment of TL1A- and IL23-associated diseases (e.g., inflammatory diseases).

### CROSS-REFERENCE TO RELATED APPLICATIONS

[0001] This application claims the benefit of U.S. Application No. 63/692,669, filed Sep. 9, 2024, U.S. Application No. 63/761,754, filed Feb. 21, 2025, and U.S. Application No. 63/796,313, filed Apr. 28, 2025, each of which is herein incorporated by reference in its entirety for all purposes.

### REFERENCE TO A SEQUENCE LISTING SUBMITTED AS AN XML FILE

[0002] The Sequence Listing written in file 636745SEQLIST.xml is 2,599,626 bytes, was created on Sep. 9, 2025, and is hereby incorporated by reference in its entirety.

### BACKGROUND

[0003] Antibody-based therapeutics have been used successfully to treat a variety of diseases. There remains a need for novel therapeutics for the treatment of diseases, particularly those that target TNF-like ligand 1A (TL1A) and/or IL23.

### SUMMARY

[0004] Provided herein are novel anti-TL1A×anti-IL23 antibodies and methods of using such antibodies for the treatment of TL1A- and/or IL23-associated diseases. Also provided are novel anti-TL1A antibodies and methods of using such antibodies for the treatment of TL1A-associated diseases, novel anti-TL23 antibodies and methods of using such antibodies for the treatment of IL23-associated diseases, and combinations of anti-TL1A antibodies and anti-IL23 antibodies and methods of using such antibodies for the treatment of TL1A- and/or IL23-associated diseases.

[0005] In one aspect provided herein is a bispecific anti-TNF-like ligand 1A (TL1A)×anti-interleukin-23 (IL23) bispecific antibody comprising: a) a means for binding TL1A; and b) a means for binding IL23.

[0006] In another aspect provided herein is a bispecific anti-TL1A×anti-IL23 antibody comprising: a) a TL1A binding domain comprising i) a first variable heavy domain (VH1), and ii) a first variable light domain (VL1); and b) a IL23 binding domain comprising i) a second variable heavy domain (VH2), and ii) a second variable light domain (VL2). In some embodiments the TL1A binding domain comprises the VH and VL of any of the TL1A binding domains in Tables 7-10. In some embodiments, the IL23 binding domain comprises the VH and VL of IL23-A[IL23]_H1L1 (Table 11).

[0007] In another aspect, provided herein is a heterodimeric antibody that comprises: a) a first monomer; b) a second monomer; and c) a light chain. The first monomer comprises: i) a single chain variable fragment (scFv); and ii) a first Fc domain, wherein the scFv is covalently attached to the N-terminus of the first Fc domain using a domain linker. The second monomer comprises, from N-terminal to C-terminal, a VH1-CH1-hinge-CH2-CH3, wherein VH1 is a first variable heavy domain and CH2-CH3 is a second Fc domain. The light chain comprises, from N-terminal to C-terminal, VL1-CL, wherein VL1 is a first variable light domain and CL is a constant light domain. The scFv comprises a second VH domain (VH2), a scFv linker, and a second variable light domain (VL2). Further, the VH1 and the VL1 together form a first antigen-binding domain (ABD) and the VH2 and the VL2 together form a second ABD, and one of the first ABD and second ABD is a TL1A binding domain and the other of the first ABD and second ABD is a IL23 binding domain.

[0008] In some embodiments, the scFv comprises, from N-terminal to C-terminal, VH2-scFv linker-VL2. In other embodiments, the scFv comprises, from N-terminal to C-terminal, VL2-scFv linker-VH2.

[0009] In some embodiments, the first ABD is the TL1A binding domain and the second ABD is the IL23 binding domain. In some embodiments, the first ABD is the IL23 binding domain and the second ABD is the TL1A binding domain. In some embodiments, the TL1A binding domain comprises the VH and VL of any of the TL1A binding domains in Tables 7-10. In certain embodiments, the IL23 binding domain comprises the VH and VL of IL23-A[IL23]_H1L1 (Table 11).

[0010] In another aspect, provided herein is a heterodimeric antibody that comprises: a) a first monomer; b) a second monomer; c) a first light chain; and d) a second light chain. The first monomer comprises a VH1-CH1-hinge-CH2-CH3, wherein VH1 is a first variable heavy domain and CH2-CH3 is a first Fc domain. The second monomer comprises a VH2-CH1-hinge-CH2-CH3, wherein VH2 is a second variable heavy domain and CH2-CH3 is a second Fc domain. The first light chain comprises a VL1-CL, wherein VL1 is a first variable light domain. The second light chain comprises a VL2-CL, wherein VL2 is a second variable light domain. The VH1 and the VL1 together form a first antigen-binding domain (ABD) and the VH2 and the VL2 together form a second ABD. One of the first ABD and second ABD is a TL1A binding domain and the other of the first ABD and second ABD is a IL23 binding domain. Further, i) CH1 of the first monomer and CL1 of the first light chain comprise a set of electrostatic steering variants as depicted in FIG. 4 or Table 27 or a set of steric skew variants as depicted in FIG. 5 or Table 28; ii) VH1 of the first monomer and VL1 of the first light chain comprise a set of electrostatic steering variants as depicted in FIG. 6 or Tables 18 and 19; iii) CH1 of the second monomer and CL1 of the second light chain comprise a set of electrostatic steering variants as depicted in FIG. 4 or Table 27 or a set of steric skew variants as depicted in FIG. 5 or Table 28; and/or iv) VH2 of the second monomer and VL2 of the second light chain comprise a set of electrostatic steering variants as depicted in FIG. 6 or Tables 18 and 19.

[0011] In some embodiments, the CH1 of the first monomer and CL1 of the first light chain comprise a set of electrostatic steering variants as depicted in FIG. 4 or Table 27. In some embodiments, the CH1 of the first monomer and CL1 of the first light chain comprise a set of steric skew variants as depicted in FIG. 5 or Table 28. In exemplary embodiments, the VH1 of the first monomer and VL1 of the first light chain comprise a set of electrostatic steering variants as depicted in FIG. 6 or Tables 18 and 19. In some embodiments, the CH1 of the second monomer and CL1 of the second light chain comprise a set of electrostatic steering variants as depicted in FIG. 4 or Table 27. In some embodiments, the CH1 of the second monomer and CL1 of the second light chain comprise a set of steric skew variants as depicted in FIG. 5 or Table 28. In exemplary embodiments, the VH2 of the second monomer and VL2 of the second light chain comprise a set of electrostatic steering variants as depicted in FIG. 6 or Tables 18 and 19.

[0012] In some embodiments, VH1 comprises amino acid substitution Q39E and VL1 comprises amino acid substitution Q38K (Kabat numbering). In some embodiments, VH1 comprises amino acid substitution Q39K and VL1 comprises amino acid substitution Q38E (Kabat numbering). In exemplary embodiments, VH1 comprises Q39E, VL1 comprises Q38K, VH2 comprises Q39K and VL2 comprises Q38E (Kabat numbering).

[0013] In some embodiments, CH1 of the first monomer comprises amino acid substitutions K213E/K218D and CL comprises amino acid substitutions D122K/E123K (EU numbering). In some embodiments, CH1 of the first monomer comprises amino acid substitutions A141F and CL comprises amino acid substitution F118A (EU numbering). In exemplary embodiments, CH1 of the first monomer comprises amino acid substitutions K213E/K218D, CL of the first light chain comprises amino acid substitutions D122K/E123K, CH1 of the second monomer comprises amino acid substitutions A141F and CL of the second light chain comprises amino acid substitution F118A (EU numbering).

[0014] In some embodiments, VH1 comprises amino acid substitution Q39E (Kabat numbering), VL1 comprises amino acid substitution Q38K (Kabat numbering), CH1 of the first monomer comprises amino acid substitutions K213E/K218D (EU numbering), CL of the first light chain comprises amino acid substitutions D122K/E123K (EU numbering), VH2 comprises amino acid substitution Q39K (Kabat numbering), VL2 comprises amino acid substitution Q38E (Kabat numbering), CH1 of the second monomer comprises amino acid substitutions A141F (EU numbering) and CL of the second light chain comprises amino acid substitution F118A (EU numbering).

[0015] In exemplary embodiments, the first ABD is the TL1A binding domain and the second ABD is the IL23 binding domain. In some embodiments, the first ABD is the IL23 binding domain and the second ABD is the TL1A binding domain. In certain embodiments, the TL1A binding domain comprises the VH and VL of any of the TL1A binding domains in Tables 7-10. In some embodiments, the IL23 binding domain comprises the VH and VL of IL23-A[IL23]_H1L1 (Table 11).

[0016] In another aspect provided herein is a heterodimeric antibody comprising: a) a first monomer; b) a second monomer; c) a first common light chain; and d) a second common light chain. The first monomer comprises a VH1-CH1-hinge-CH2-CH3, wherein VH1 is a first variable heavy domain and CH2-CH3 is a first Fc domain. The second monomer comprises a VH2-CH1-hinge-CH2-CH3, wherein VH2 is a second variable heavy domain and CH2-CH3 is a second Fc domain. Each of the first and second common light chains comprise a VL-CL. The VH1 and the VL of the first common light chain together form a first antigen-binding domain (ABD) and the VH2 and the VL of the second common light chain together form a second ABD.

[0017] In some embodiments, the first ABD is the TL1A binding domain and the second ABD is the IL23 binding domain. In other embodiments, the first ABD is the IL23 binding domain and the second ABD is the TL1A binding domain.

[0018] In some embodiments, the TL1A binding domain comprises the VH and VL of any of the TL1A binding domains in Tables 7-10. In some embodiments, the IL23 binding domain comprises the VH and VL of IL23-A[IL23]_H1L1 (Table 11).

[0019] In another aspect, provided herein is a heterodimeric antibody that comprises: a) a first monomer; b) a second monomer; c) a first light chain; and d) a second light chain. The first monomer comprises: i) a VH1-CH1-hinge-CH2-CH3, and ii) a first scFv comprising a VH2-scFv linker-VL2, wherein the scFv is covalently attached to the CH3 of the first monomer by a linker. The second monomer comprises: i) a VH1-CH1-hinge-CH2-CH3, and ii) a second scFv comprising a VH2-scFv linker-VL2, wherein the scFv is covalently attached to the CH3 of the second monomer by a linker. Each of the first and second light chains comprise a VL1-CL. Each of the VH1s of the first monomer and second monomer are a first variable heavy domain, each of the VL1s of the first monomer and second monomer are a first light domain, each of the VH2s are a second variable heavy domain, and each of the VL2s are a second variable light domain. Further, the VH1 of the first monomer and VL1 of the first light chain, and the VH1 of the second monomer and VL1 of the second light chain each form a first antigen-binding domain, and the VH2 and VL2 of the first and second scFvs each for a second antigen-binding domain, wherein the first ABDs or the second ABDs are TL1A binding domains and the other of the first ABDs and second ABDs are IL23 binding domains.

[0020] In some embodiments, the first and second scFvs each comprise, from N-terminal to C-terminal, VH2-scFv linker-VL2. In other embodiments, the first and second scFvs each comprise, from N-terminal to C-terminal, VL2-scFv linker-VH2.

[0021] In some embodiments, the first ABDs are the TL1A binding domains and the second ABDs are the IL23 binding domain. In other embodiments, the first ABD is the IL23 binding domain and the second ABD is the TL1A binding domain. In some embodiments, the TL1A binding domain comprises the VH and VL of any of the TL1A binding domains in Tables 7-10. In some embodiments, the IL23 binding domain comprises the VH and VL of IL23-A[IL23]_H1L1 (Table 11).

[0022] In some embodiments of the heterodimeric antibodies provided herein, the first Fc domain and second Fc domain are each variant Fc domains. In some embodiments, the first and second Fc domains comprise a set of heterodimerization skew variants selected from the following heterodimerization variants: S364K/E357Q:L368D/K370S; S364K:L368D/K370S; S364K:L368E/K370S; D401K:T411E/K360E/Q362E; and T366W:T366S/L368A/Y407V, wherein numbering is according to EU numbering. In exemplary embodiments, the first and second Fc domains comprise heterodimerization skew variants S364K/E357Q:L368D/K370S, wherein numbering is according to EU numbering.

[0023] In some embodiments, the first and second Fc domains each comprise one or more ablation variants. In some embodiments, the one or more ablation variants comprise E233P/L234V/L235A/G236del/S267K, wherein numbering is according to EU numbering.

[0024] In some embodiments, one of the first or second monomer further comprises one or more pI variants. In some embodiments, the CH1-hinge-CH2-CH3 of the second monomer comprises pI variants N208D/Q295E/N384D/Q418E/N421D, wherein numbering is according to EU numbering.

[0025] In some embodiments, the CH1-hinge-CH2-CH3 of the second monomer comprises amino acid variants E233P/L234V/L235A/G236del/S267K/L368D/K370S/N208D/Q295E/N384D/Q418E/N421 D, the first Fc domain comprises amino acid variants E233P/L234V/L235A/G236del/S267K/S364K/E357Q, and wherein numbering is according to EU numbering.

[0026] In some embodiments, the first and second variant Fc domains each comprise amino acid variants 428L/434S.

[0027] In some embodiments wherein the heterodimeric antibody includes an scFv with an scFv linker, the scFv linker has the amino acid sequence GKPGSGKPGSGKPGSGKPGS (SEQ ID NO: 16).

[0028] Also provided herein are nucleic acid and expression vector compositions encoding the subject antibodies, host cells comprising the expression vector compositions, and methods of making the subject antibodies.

[0029] In another aspect, provided herein is a method of treating a TL1A-associated and/or IL23 associated disease in a patient in need thereof, comprising administering to the patient a subject anti-TL1A×anti-IL23 antibody described herein.

[0030] In one aspect, provided are bispecific or heterodimeric antibodies comprising: (a) a TL1A-binding domain comprising a first variable heavy domain (VH1) and a first variable light domain (VL1); and (b) an IL23-binding domain comprising a second variable heavy domain (VH2) and a second variable light domain (VL2).

[0031] In some such antibodies, the VH1 comprises a vhCDR1, a vhCDR2, and a vhCDR3 and the VL1 comprises a vlCDR1, a vlCDR2, and a vlCDR3 contained within any pair of anti-TL1A variable heavy domain and variable light domain in Table 44, optionally wherein the CDRs are as defined by the Kabat, Chothia, Kabat+Chothia, AbM, contact, or IMGT definition. In some such antibodies, the VH1 comprises a vhCDR1, a vhCDR2, and a vhCDR3 and the VL1 comprises a vlCDR1, a vlCDR2, and a vlCDR3 contained within any pair of anti-TL1A variable heavy domain and variable light domain in Tables 7-10, 22, 23, 26, 29-34, and 48, optionally wherein the CDRs are as defined by the Kabat, Chothia, Kabat+Chothia, AbM, contact, or IMGT definition. In some such antibodies, the VH1 comprises a vhCDR1, a vhCDR2, and a vhCDR3 contained within a variable heavy domain comprising the amino acid sequence of any one of SEQ ID NOS: 1427-1823 and 2316-2330, and the VL1 comprises a vlCDR1, a vlCDR2, and a vlCDR3 contained within a variable light domain comprising the amino acid sequence of any one of 1824-1923, optionally wherein the CDRs are as defined by the Kabat, Chothia, Kabat+Chothia, AbM, contact, or IMGT definition. In some such antibodies, the VH1 and VL1 comprise any pair of anti-TL1A variable heavy domain and variable light domain in Table 44, or variants thereof in which an N-terminal glutamine or glutamate is replaced with pyroglutamate. In some such antibodies, the VH1 and VL1 comprise any pair of anti-TL1A variable heavy domain and variable light domain in Tables 7-10, 22, 23, 26, 29-34, and 48, or variants thereof in which an N-terminal glutamine or glutamate is replaced with pyroglutamate. In some such antibodies, the VH1 and VL1 comprise a variable heavy domain comprising the amino acid sequence of any one of SEQ ID NOS: 1427-1823 and 2316-2330, and a variable light domain comprising the amino acid sequence of any one of 1824-1923, or variants thereof in which an N-terminal glutamine or glutamate is replaced with pyroglutamate.

[0032] In some such antibodies, the VH2 comprises a vhCDR1, a vhCDR2, and a vhCDR3 and the VL2 comprises a vlCDR1, a vlCDR2, and a vlCDR3 contained within any pair of anti-TL1A variable heavy domain and variable light domain in Table 44, optionally wherein the CDRs are as defined by the Kabat, Chothia, Kabat+Chothia, AbM, contact, or IMGT definition. In some such antibodies, the VH2 comprises a vhCDR1, a vhCDR2, and a vhCDR3 and the VL2 comprises a vlCDR1, a vlCDR2, and a vlCDR3 contained within any pair of anti-TL1A variable heavy domain and variable light domain in Tables 11, 24-26, 29-34, and 49, optionally wherein the CDRs are as defined by the Kabat, Chothia, Kabat+Chothia, AbM, contact, or IMGT definition. In some such antibodies, the VH2 comprises a vhCDR1, a vhCDR2, and a vhCDR3 contained within a variable heavy domain comprising the amino acid sequence of any one of 1927-2132, and the VL2 comprises a vlCDR1, a vlCDR2, and a vlCDR3 contained within a variable light domain comprising the amino acid sequence of any one of 2133-2232, optionally wherein the CDRs are as defined by the Kabat, Chothia, Kabat+Chothia, AbM, contact, or IMGT definition. In some such antibodies, the VH2 and VL2 comprise any pair of anti-IL23 variable heavy domain and variable light domain in Table 44 or variants thereof in which an N-terminal glutamine or glutamate is replaced with pyroglutamate. In some such antibodies, the VH2 and VL2 comprise any pair of anti-IL23 variable heavy domain and variable light domain in Tables 11, 24-26, 29-34, and 49 or variants thereof in which an N-terminal glutamine or glutamate is replaced with pyroglutamate. In some such antibodies, the VH2 and VL2 comprise a variable heavy domain comprising the amino acid sequence of any one of 1927-2132, and a variable light domain comprising the amino acid sequence of any one of 2133-2232 or variants thereof in which an N-terminal glutamine or glutamate is replaced with pyroglutamate.

[0033] In some such antibodies, the VH1 and the VL1 comprise a variable heavy domain comprising a vhCDR1, a vhCDR2, and a vhCDR3 contained within a variable heavy domain comprising the amino acid sequence of any one of SEQ ID NOS: 2241, 2253, 2259, 1674, and 1200, and a variable light domain comprising a vlCDR1, a vlCDR2, and a vlCDR3 contained within a variable light domain comprising the amino acid sequence of any one of SEQ ID NOS: 2243 and 1204. In some such antibodies, the VH1 and the VL1 comprise a variable heavy domain comprising a vhCDR1, a vhCDR2, and a vhCDR3 contained within a variable heavy domain comprising the amino acid sequence of SEQ ID NO: 2241, and a variable light domain comprising a vlCDR1, a vlCDR2, and a vlCDR3 contained within a variable light domain comprising the amino acid sequence of SEQ ID NO: 2243. In some such antibodies, the VH1 and the VL1 comprise a variable heavy domain comprising a vhCDR1, a vhCDR2, and a vhCDR3 contained within a variable heavy domain comprising the amino acid sequence of SEQ ID NO: 2253, and a variable light domain comprising a vlCDR1, a vlCDR2, and a vlCDR3 contained within a variable light domain comprising the amino acid sequence of SEQ ID NO: 2243. In some such antibodies, the VH1 and the VL1 comprise a variable heavy domain comprising a vhCDR1, a vhCDR2, and a vhCDR3 contained within a variable heavy domain comprising the amino acid sequence of SEQ ID NO: 2259, and a variable light domain comprising a vlCDR1, a vlCDR2, and a vlCDR3 contained within a variable light domain comprising the amino acid sequence of SEQ ID NO: 2243. In some such antibodies, the VH1 and the VL1 comprise a variable heavy domain comprising a vhCDR1, a vhCDR2, and a vhCDR3 contained within a variable heavy domain comprising the amino acid sequence of SEQ ID NO: 1674, and a variable light domain comprising a vlCDR1, a vlCDR2, and a vlCDR3 contained within a variable light domain comprising the amino acid sequence of SEQ ID NO: 1204. In some such antibodies, the VH1 and the VL1 comprise a variable heavy domain comprising a vhCDR1, a vhCDR2, and a vhCDR3 contained within a variable heavy domain comprising the amino acid sequence of SEQ ID NO: 1200, and a variable light domain comprising a vlCDR1, a vlCDR2, and a vlCDR3 contained within a variable light domain comprising the amino acid sequence of SEQ ID NO: 1204. In some such antibodies, the VH1 and the VL1 comprise a variable heavy domain comprising a vhCDR1, a vhCDR2, and a vhCDR3 contained within a variable heavy domain comprising the amino acid sequence of any one of SEQ ID NOS: 1427-1823 and 2316-2330, and a variable light domain comprising a vlCDR1, a vlCDR2, and a vlCDR3 contained within a variable light domain comprising the amino acid sequence of any one of SEQ ID NOS: 1824-1923. In some such antibodies, the VH1 and the VL1 comprise a variable heavy domain comprising a vhCDR1, a vhCDR2, and a vhCDR3 contained within a variable heavy domain comprising the amino acid sequence of any one of SEQ ID NOS: 1674, 1200, 1661, and 2323, and a variable light domain comprising a vlCDR1, a vlCDR2, and a vlCDR3 contained within a variable light domain comprising the amino acid sequence of SEQ ID NO: 1204. In some such antibodies, the VH1 and the VL1 comprise a variable heavy domain comprising a vhCDR1, a vhCDR2, and a vhCDR3 contained within a variable heavy domain comprising the amino acid sequence of SEQ ID NO: 1661, and a variable light domain comprising a vlCDR1, a vlCDR2, and a vlCDR3 contained within a variable light domain comprising the amino acid sequence of SEQ ID NO: 1204. In some such antibodies, the VH1 and the VL1 comprise a variable heavy domain comprising a vhCDR1, a vhCDR2, and a vhCDR3 contained within a variable heavy domain comprising the amino acid sequence of SEQ ID NO: 2323, and a variable light domain comprising a vlCDR1, a vlCDR2, and a vlCDR3 contained within a variable light domain comprising the amino acid sequence of SEQ ID NO: 1204. In some such antibodies, the VH1 and the VL1 comprise a variable heavy domain comprising a vhCDR1, a vhCDR2, and a vhCDR3 contained within a variable heavy domain comprising the amino acid sequence of SEQ ID NO: 101, and a variable light domain comprising a vlCDR1, a vlCDR2, and a vlCDR3 contained within a variable light domain comprising the amino acid sequence of SEQ ID NO: 105. In some such antibodies, the VH1 and the VL1 comprise a variable heavy domain comprising a vhCDR1, a vhCDR2, and a vhCDR3 contained within a variable heavy domain comprising the amino acid sequence of SEQ ID NO: 109, and a variable light domain comprising a vlCDR1, a vlCDR2, and a vlCDR3 contained within a variable light domain comprising the amino acid sequence of SEQ ID NO: 113. In some such antibodies, the VH1 and the VL1 comprise a variable heavy domain comprising a vhCDR1, a vhCDR2, and a vhCDR3 contained within a variable heavy domain comprising the amino acid sequence of SEQ ID NO: 117, and a variable light domain comprising a vlCDR1, a vlCDR2, and a vlCDR3 contained within a variable light domain comprising the amino acid sequence of SEQ ID NO: 121. In some such antibodies, the VH1 and the VL1 comprise a variable heavy domain comprising a vhCDR1, a vhCDR2, and a vhCDR3 contained within a variable heavy domain comprising the amino acid sequence of SEQ ID NO: 125, and a variable light domain comprising a vlCDR1, a vlCDR2, and a vlCDR3 contained within a variable light domain comprising the amino acid sequence of SEQ ID NO: 129. In some such antibodies, the VH1 and the VL1 comprise a variable heavy domain comprising a vhCDR1, a vhCDR2, and a vhCDR3 contained within a variable heavy domain comprising the amino acid sequence of SEQ ID NO: 133, and a variable light domain comprising a vlCDR1, a vlCDR2, and a vlCDR3 contained within a variable light domain comprising the amino acid sequence of SEQ ID NO: 137. In some such antibodies, the VH1 and the VL1 comprise a variable heavy domain comprising a vhCDR1, a vhCDR2, and a vhCDR3 contained within a variable heavy domain comprising the amino acid sequence of SEQ ID NO: 141, and a variable light domain comprising a vlCDR1, a vlCDR2, and a vlCDR3 contained within a variable light domain comprising the amino acid sequence of SEQ ID NO: 145. In some such antibodies, the VH1 and the VL1 comprise a variable heavy domain comprising a vhCDR1, a vhCDR2, and a vhCDR3 contained within a variable heavy domain comprising the amino acid sequence of SEQ ID NO: 149, and a variable light domain comprising a vlCDR1, a vlCDR2, and a vlCDR3 contained within a variable light domain comprising the amino acid sequence of SEQ ID NO: 153. In some such antibodies, the VH1 and the VL1 comprise a variable heavy domain comprising a vhCDR1, a vhCDR2, and a vhCDR3 contained within a variable heavy domain comprising the amino acid sequence of SEQ ID NO: 157, and a variable light domain comprising a vlCDR1, a vlCDR2, and a vlCDR3 contained within a variable light domain comprising the amino acid sequence of SEQ ID NO: 159. In some such antibodies, the VH1 and the VL1 comprise a variable heavy domain comprising a vhCDR1, a vhCDR2, and a vhCDR3 contained within a variable heavy domain comprising the amino acid sequence of SEQ ID NO: 161, and a variable light domain comprising a vlCDR1, a vlCDR2, and a vlCDR3 contained within a variable light domain comprising the amino acid sequence of SEQ ID NO: 165. In some such antibodies, the VH1 and the VL1 comprise a variable heavy domain comprising a vhCDR1, a vhCDR2, and a vhCDR3 contained within a variable heavy domain comprising the amino acid sequence of SEQ ID NO: 169, and a variable light domain comprising a vlCDR1, a vlCDR2, and a vlCDR3 contained within a variable light domain comprising the amino acid sequence of SEQ ID NO: 173. In some such antibodies, the VH1 and the VL1 comprise a variable heavy domain comprising a vhCDR1, a vhCDR2, and a vhCDR3 and a variable light domain comprising a vlCDR1, a vlCDR2, and a vlCDR3 contained within any pair of anti-TL1A variable heavy domain and variable light domain in XENP53412, XENP53413, XENP53369, XENP53375, XENP53387, XENP53415, XENP53370, XENP53371, XENP53376, XENP53377, XENP53378, XENP53379, XENP53380, or XENP53414. In some such antibodies, the VH1 and the VL1 comprise a variable heavy domain comprising a vhCDR1, a vhCDR2, and a vhCDR3 and a variable light domain comprising a vlCDR1, a vlCDR2, and a vlCDR3 contained within any pair of anti-TL1A variable heavy domain and variable light domain in Tables 29 and 31-34. In any of the above, the CDRs are optionally as defined by the Kabat, Chothia, Kabat+Chothia, AbM, contact, or IMGT definition.

[0034] In some such antibodies, the VH1 and the VL1 comprise a variable heavy domain comprising a vhCDR1 comprising the amino acid sequence of SEQ ID NO: 102 or 1201, a vhCDR2 comprising the amino acid sequence of SEQ ID NO: 1924 or 1202, and a vhCDR3 comprising the amino acid sequence of SEQ ID NO: 1203 or 104, and a variable light domain comprising a vlCDR1 comprising the amino acid sequence of SEQ ID NO: 106, a vlCDR2 comprising the amino acid sequence of SEQ ID NO: 107, and a vlCDR3 comprising the amino acid sequence of SEQ ID NO: 108. In some such antibodies, the VH1 and the VL1 comprise a variable heavy domain comprising a vhCDR1 comprising the amino acid sequence of SEQ ID NO: 102, a vhCDR2 comprising the amino acid sequence of SEQ ID NO: 1924, and a vhCDR3 comprising the amino acid sequence of SEQ ID NO: 1203, and a variable light domain comprising a vlCDR1 comprising the amino acid sequence of SEQ ID NO: 106, a vlCDR2 comprising the amino acid sequence of SEQ ID NO: 107, and a vlCDR3 comprising the amino acid sequence of SEQ ID NO: 108. In some such antibodies, the VH1 and the VL1 comprise a variable heavy domain comprising a vhCDR1 comprising the amino acid sequence of SEQ ID NO: 1201, a vhCDR2 comprising the amino acid sequence of SEQ ID NO: 1202, and a vhCDR3 comprising the amino acid sequence of SEQ ID NO: 1203, and a variable light domain comprising a vlCDR1 comprising the amino acid sequence of SEQ ID NO: 106, a vlCDR2 comprising the amino acid sequence of SEQ ID NO: 107, and a vlCDR3 comprising the amino acid sequence of SEQ ID NO: 108. In some such antibodies, the VH1 and the VL1 comprise a variable heavy domain comprising a vhCDR1 comprising the amino acid sequence of SEQ ID NO: 102, a vhCDR2 comprising the amino acid sequence of SEQ ID NO: 1924, and a vhCDR3 comprising the amino acid sequence of SEQ ID NO: 104, and a variable light domain comprising a vlCDR1 comprising the amino acid sequence of SEQ ID NO: 106, a vlCDR2 comprising the amino acid sequence of SEQ ID NO: 107, and a vlCDR3 comprising the amino acid sequence of SEQ ID NO: 108. In some such antibodies, the VH1 and the VL1 comprise a variable heavy domain comprising a vhCDR1 comprising the amino acid sequence of SEQ ID NO: 102, a vhCDR2 comprising the amino acid sequence of SEQ ID NO: 1926, and a vhCDR3 comprising the amino acid sequence of SEQ ID NO: 104, and a variable light domain comprising a vlCDR1 comprising the amino acid sequence of SEQ ID NO: 106, a vlCDR2 comprising the amino acid sequence of SEQ ID NO: 107, and a vlCDR3 comprising the amino acid sequence of SEQ ID NO: 108. In some such antibodies, the VH1 and the VL1 comprise a variable heavy domain comprising a vhCDR1 comprising the amino acid sequence of SEQ ID NO: 102, a vhCDR2 comprising the amino acid sequence of SEQ ID NO: 103, and a vhCDR3 comprising the amino acid sequence of SEQ ID NO: 104, and a variable light domain comprising a vlCDR1 comprising the amino acid sequence of SEQ ID NO: 106, a vlCDR2 comprising the amino acid sequence of SEQ ID NO: 107, and a vlCDR3 comprising the amino acid sequence of SEQ ID NO: 108. In some such antibodies, the VH1 and the VL1 comprise a variable heavy domain comprising a vhCDR1 comprising the amino acid sequence of SEQ ID NO: 110, a vhCDR2 comprising the amino acid sequence of SEQ ID NO: 111, and a vhCDR3 comprising the amino acid sequence of SEQ ID NO: 112, and a variable light domain comprising a vlCDR1 comprising the amino acid sequence of SEQ ID NO: 114, a vlCDR2 comprising the amino acid sequence of SEQ ID NO: 115, and a vlCDR3 comprising the amino acid sequence of SEQ ID NO: 116. In some such antibodies, the VH1 and the VL1 comprise a variable heavy domain comprising a vhCDR1 comprising the amino acid sequence of SEQ ID NO: 118, a vhCDR2 comprising the amino acid sequence of SEQ ID NO: 119, and a vhCDR3 comprising the amino acid sequence of SEQ ID NO: 120, and a variable light domain comprising a vlCDR1 comprising the amino acid sequence of SEQ ID NO: 122, a vlCDR2 comprising the amino acid sequence of SEQ ID NO: 123, and a vlCDR3 comprising the amino acid sequence of SEQ ID NO: 124. In some such antibodies, the VH1 and the VL1 comprise a variable heavy domain comprising a vhCDR1 comprising the amino acid sequence of SEQ ID NO: 126, a vhCDR2 comprising the amino acid sequence of SEQ ID NO: 127, and a vhCDR3 comprising the amino acid sequence of SEQ ID NO: 128, and a variable light domain comprising a vlCDR1 comprising the amino acid sequence of SEQ ID NO: 130, a vlCDR2 comprising the amino acid sequence of SEQ ID NO: 131, and a vlCDR3 comprising the amino acid sequence of the amino acid sequence of SEQ ID NO: 132. In some such antibodies, the VH1 and the VL1 comprise a variable heavy domain comprising a vhCDR1 comprising the amino acid sequence of SEQ ID NO: 134, a vhCDR2 comprising the amino acid sequence of SEQ ID NO: 135, and a vhCDR3 comprising the amino acid sequence of SEQ ID NO: 136, and a variable light domain comprising a vlCDR1 comprising the amino acid sequence of SEQ ID NO: 138, a vlCDR2 comprising the amino acid sequence of SEQ ID NO: 139, and a vlCDR3 comprising the amino acid sequence of the amino acid sequence of SEQ ID NO: 140. In some such antibodies, the VH1 and the VL1 comprise a variable heavy domain comprising a vhCDR1 comprising the amino acid sequence of SEQ ID NO: 142, a vhCDR2 comprising the amino acid sequence of SEQ ID NO: 143, and a vhCDR3 comprising the amino acid sequence of SEQ ID NO: 144, and a variable light domain comprising a vlCDR1 comprising the amino acid sequence of SEQ ID NO: 146, a vlCDR2 comprising the amino acid sequence of SEQ ID NO: 147, and a vlCDR3 comprising the amino acid sequence of SEQ ID NO: 148. In some such antibodies, the VH1 and the VL1 comprise a variable heavy domain comprising a vhCDR1 comprising the amino acid sequence of SEQ ID NO: 150, a vhCDR2 comprising the amino acid sequence of SEQ ID NO: 151, and a vhCDR3 comprising the amino acid sequence of SEQ ID NO: 152, and a variable light domain comprising a vlCDR1 comprising the amino acid sequence of SEQ ID NO: 154, a vlCDR2 comprising the amino acid sequence of SEQ ID NO: 155, and a vlCDR3 comprising the amino acid sequence of SEQ ID NO: 156. In some such antibodies, the VH1 and the VL1 comprise a variable heavy domain comprising a vhCDR1 comprising the amino acid sequence of SEQ ID NO: 118, a vhCDR2 comprising the amino acid sequence of SEQ ID NO: 158, and a vhCDR3 comprising the amino acid sequence of SEQ ID NO: 120, and a variable light domain comprising a vlCDR1 comprising the amino acid sequence of SEQ ID NO: 122, a vlCDR2 comprising the amino acid sequence of SEQ ID NO: 123, and a vlCDR3 comprising the amino acid sequence of SEQ ID NO: 160. In some such antibodies, the VH1 and the VL1 comprise a variable heavy domain comprising a vhCDR1 comprising the amino acid sequence of SEQ ID NO: 162, a vhCDR2 comprising the amino acid sequence of SEQ ID NO: 163, and a vhCDR3 comprising the amino acid sequence of SEQ ID NO: 164, and a variable light domain comprising a vlCDR1 comprising the amino acid sequence of SEQ ID NO: 166, a vlCDR2 comprising the amino acid sequence of SEQ ID NO: 167, and a vlCDR3 comprising the amino acid sequence of SEQ ID NO: 168. In some such antibodies, the VH1 and the VL1 comprise a variable heavy domain comprising a vhCDR1 comprising the amino acid sequence of SEQ ID NO: 170, a vhCDR2 comprising the amino acid sequence of SEQ ID NO: 171, and a vhCDR3 comprising the amino acid sequence of SEQ ID NO: 172, and a variable light domain comprising a vlCDR1 comprising the amino acid sequence of SEQ ID NO: 174, a vlCDR2 comprising the amino acid sequence of SEQ ID NO: 175, and a vlCDR3 comprising the amino acid sequence of SEQ ID NO: 176.

[0035] In some such antibodies, the VH1 is at least 90%, at least 95%, at least 96%, at least 97%, at least 98%, or at least 99% identical to the amino acid sequence of any one of SEQ ID NOS: 2241, 2253, 2259, 1674, and 1200, and the VL1 is at least 90%, at least 95%, at least 96%, at least 97%, at least 98%, or at least 99% identical to the amino acid sequence of any one of SEQ ID NOS: 2243 and 1204. In some such antibodies, the VH1 is at least 90%, at least 95%, at least 96%, at least 97%, at least 98%, or at least 99% identical to the amino acid sequence of SEQ ID NO: 2241, and the VL1 is at least 90%, at least 95%, at least 96%, at least 97%, at least 98%, or at least 99% identical to the amino acid sequence of SEQ ID NO: 2243. In some such antibodies, the VH1 is at least 90%, at least 95%, at least 96%, at least 97%, at least 98%, or at least 99% identical to the amino acid sequence of SEQ ID NO: 2253, and the VL1 is at least 90%, at least 95%, at least 96%, at least 97%, at least 98%, or at least 99% identical to the amino acid sequence of SEQ ID NO: 2243. In some such antibodies, the VH1 is at least 90%, at least 95%, at least 96%, at least 97%, at least 98%, or at least 99% identical to the amino acid sequence of SEQ ID NO: 2259, and the VL1 is at least 90%, at least 95%, at least 96%, at least 97%, at least 98%, or at least 99% identical to the amino acid sequence of SEQ ID NO: 2243. In some such antibodies, the VH1 is at least 90%, at least 95%, at least 96%, at least 97%, at least 98%, or at least 99% identical to the amino acid sequence of SEQ ID NO: 1674, and the VL1 is at least 90%, at least 95%, at least 96%, at least 97%, at least 98%, or at least 99% identical to the amino acid sequence of SEQ ID NO: 1204. In some such antibodies, the VH1 is at least 90%, at least 95%, at least 96%, at least 97%, at least 98%, or at least 99% identical to the amino acid sequence of SEQ ID NO: 1200, and the VL1 is at least 90%, at least 95%, at least 96%, at least 97%, at least 98%, or at least 99% identical to the amino acid sequence of SEQ ID NO: 1204. In some such antibodies, the VH1 is at least 90%, at least 95%, at least 96%, at least 97%, at least 98%, or at least 99% identical to the amino acid sequence of any one of SEQ ID NOS: 1427-1823 and 2316-2330, and the VL1 is at least 90%, at least 95%, at least 96%, at least 97%, at least 98%, or at least 99% identical to the amino acid sequence of any one of SEQ ID NOS: 1824-1923. In some such antibodies, the VH1 is at least 90%, at least 95%, at least 96%, at least 97%, at least 98%, or at least 99% identical to the amino acid sequence of any one of SEQ ID NOS: 1674, 1200, 1661, and 2323, and the VL1 is at least 90%, at least 95%, at least 96%, at least 97%, at least 98%, or at least 99% identical to the amino acid sequence of SEQ ID NO: 1204. In some such antibodies, the VH1 is at least 90%, at least 95%, at least 96%, at least 97%, at least 98%, or at least 99% identical to the amino acid sequence of SEQ ID NO: 1661, and the VL1 is at least 90%, at least 95%, at least 96%, at least 97%, at least 98%, or at least 99% identical to the amino acid sequence of SEQ ID NO: 1204. In some such antibodies, the VH1 is at least 90%, at least 95%, at least 96%, at least 97%, at least 98%, or at least 99% identical to the amino acid sequence of SEQ ID NO: 2323, and the VL1 is at least 90%, at least 95%, at least 96%, at least 97%, at least 98%, or at least 99% identical to the amino acid sequence of SEQ ID NO: 1204. In some such antibodies, the VH1 is at least 90%, at least 95%, at least 96%, at least 97%, at least 98%, or at least 99% identical to the amino acid sequence of SEQ ID NO: 101, and the VL1 is at least 90%, at least 95%, at least 96%, at least 97%, at least 98%, or at least 99% identical to the amino acid sequence of SEQ ID NO: 105. In some such antibodies, the VH1 is at least 90%, at least 95%, at least 96%, at least 97%, at least 98%, or at least 99% identical to the amino acid sequence of SEQ ID NO: 109, and the VL1 is at least 90%, at least 95%, at least 96%, at least 97%, at least 98%, or at least 99% identical to the amino acid sequence of SEQ ID NO: 113. In some such antibodies, the VH1 is at least 90%, at least 95%, at least 96%, at least 97%, at least 98%, or at least 99% identical to the amino acid sequence of SEQ ID NO: 117, and the VL1 is at least 90%, at least 95%, at least 96%, at least 97%, at least 98%, or at least 99% identical to the amino acid sequence of SEQ ID NO: 121. In some such antibodies, the VH1 is at least 90%, at least 95%, at least 96%, at least 97%, at least 98%, or at least 99% identical to the amino acid sequence of SEQ ID NO: 125, and the VL1 is at least 90%, at least 95%, at least 96%, at least 97%, at least 98%, or at least 99% identical to the amino acid sequence of SEQ ID NO: 129. In some such antibodies, the VH1 is at least 90%, at least 95%, at least 96%, at least 97%, at least 98%, or at least 99% identical to the amino acid sequence SEQ ID NO: 133, and the VL1 is at least 90%, at least 95%, at least 96%, at least 97%, at least 98%, or at least 99% identical to the amino acid sequence of SEQ ID NO: 137. In some such antibodies, the VH1 is at least 90%, at least 95%, at least 96%, at least 97%, at least 98%, or at least 99% identical to the amino acid sequence of SEQ ID NO: 141, and the VL1 is at least 90%, at least 95%, at least 96%, at least 97%, at least 98%, or at least 99% identical to the amino acid sequence of SEQ ID NO: 145. In some such antibodies, the VH1 is at least 90%, at least 95%, at least 96%, at least 97%, at least 98%, or at least 99% identical to the amino acid sequence of SEQ ID NO: 149, and the VL1 is at least 90%, at least 95%, at least 96%, at least 97%, at least 98%, or at least 99% identical to the amino acid sequence of SEQ ID NO: 153. In some such antibodies, the VH1 is at least 90%, at least 95%, at least 96%, at least 97%, at least 98%, or at least 99% identical to the amino acid sequence of SEQ ID NO: 157, and the VL1 is at least 90%, at least 95%, at least 96%, at least 97%, at least 98%, or at least 99% identical to the amino acid sequence of SEQ ID NO: 159. In some such antibodies, the VH1 is at least 90%, at least 95%, at least 96%, at least 97%, at least 98%, or at least 99% identical to the amino acid sequence of SEQ ID NO: 161, and the VL1 is at least 90%, at least 95%, at least 96%, at least 97%, at least 98%, or at least 99% identical to the amino acid sequence of SEQ ID NO: 165. In some such antibodies, the VH1 is at least 90%, at least 95%, at least 96%, at least 97%, at least 98%, or at least 99% identical to the amino acid sequence of SEQ ID NO: 169, and the VL1 is at least 90%, at least 95%, at least 96%, at least 97%, at least 98%, or at least 99% identical to the amino acid sequence of SEQ ID NO: 173. In some such antibodies, the VH1 and the VL1 are at least 90%, at least 95%, at least 96%, at least 97%, at least 98%, or at least 99% identical to any pair of anti-TL1A variable heavy domain and variable light domain in XENP53412, XENP53413, XENP53369, XENP53375, XENP53387, XENP53415, XENP53370, XENP53371, XENP53376, XENP53377, XENP53378, XENP53379, XENP53380, or XENP53414. In some such antibodies, the VH1 and the VL1 are at least 90%, at least 95%, at least 96%, at least 97%, at least 98%, or at least 99% identical to any pair of anti-TL1A variable heavy domain and variable light domain in Tables 29 and 31-34.

[0036] In some such antibodies, the VH1 comprises the amino acid sequence of any one of SEQ ID NOS: 2241, 2253, 2259, 1674, and 1200, and the VL1 comprises the amino acid sequence of any one of SEQ ID NOS: 2243 and 1204. In some such antibodies, the VH1 comprises the amino acid sequence of SEQ ID NO: 2241, and the VL1 comprises the amino acid sequence of SEQ ID NO: 2243. In some such antibodies, the VH1 comprises the amino acid sequence of SEQ ID NO: 2253, and the VL1 comprises the amino acid sequence of SEQ ID NO: 2243. In some such antibodies, the VH1 comprises the amino acid sequence of SEQ ID NO: 2259, and the VL1 comprises the amino acid sequence of SEQ ID NO: 2243. In some such antibodies, the VH1 comprises the amino acid sequence of SEQ ID NO: 1674, and the VL1 comprises the amino acid sequence of SEQ ID NO: 1204. In some such antibodies, the VH1 comprises the amino acid sequence of SEQ ID NO: 1200, and the VL1 comprises the amino acid sequence of SEQ ID NO: 1204. In some such antibodies, the VH1 comprises the amino acid sequence of any one of SEQ ID NOS: 1427-1823 and 2316-2330, and the VL1 comprises the amino acid sequence of any one of SEQ ID NOS: 1824-1923. In some such antibodies, the VH1 comprises the amino acid sequence of any one of SEQ ID NOS: 1674, 1200, 1661, and 2323, and the VL1 comprises the amino acid sequence of SEQ ID NO: 1204. In some such antibodies, the VH1 comprises the amino acid sequence of SEQ ID NO: 1661, and the VL1 comprises the amino acid sequence of SEQ ID NO: 1204. In some such antibodies, the VH1 comprises the amino acid sequence of SEQ ID NO: 2323, and the VL1 comprises the amino acid sequence of SEQ ID NO: 1204. In some such antibodies, the VH1 comprises the amino acid sequence of SEQ ID NO: 101, and the VL1 comprises the amino acid sequence of SEQ ID NO: 105. In some such antibodies, the VH1 comprises the amino acid sequence of SEQ ID NO: 109, and the VL1 comprises the amino acid sequence of SEQ ID NO: 113. In some such antibodies, the VH1 comprises the amino acid sequence of SEQ ID NO: 117, and the VL1 comprises the amino acid sequence of SEQ ID NO: 121. In some such antibodies, the VH1 comprises the amino acid sequence of SEQ ID NO: 125, and the VL1 comprises the amino acid sequence of SEQ ID NO: 129. In some such antibodies, the VH1 comprises the amino acid sequence of SEQ ID NO: 133, and the VL1 comprises the amino acid sequence of SEQ ID NO: 137. In some such antibodies, the VH1 comprises the amino acid sequence of SEQ ID NO: 141, and the VL1 comprises the amino acid sequence of SEQ ID NO: 145. In some such antibodies, the VH1 comprises the amino acid sequence of SEQ ID NO: 149, and the VL1 comprises the amino acid sequence of SEQ ID NO: 153. In some such antibodies, the VH1 comprises the amino acid sequence of SEQ ID NO: 157, and the VL1 comprises the amino acid sequence of SEQ ID NO: 159. In some such antibodies, the VH1 comprises the amino acid sequence of SEQ ID NO: 161, and the VL1 comprises the amino acid sequence of SEQ ID NO: 165. In some such antibodies, the VH1 comprises the amino acid sequence of SEQ ID NO: 169, and the VL1 comprises the amino acid sequence of SEQ ID NO: 173. In some such antibodies, the VH1 and the VL1 comprise any pair of anti-TL1A variable heavy domain and variable light domain in XENP53412, XENP53413, XENP53369, XENP53375, XENP53387, XENP53415, XENP53370, XENP53371, XENP53376, XENP53377, XENP53378, XENP53379, XENP53380, or XENP53414. In some such antibodies, the VH1 and the VL1 comprise any pair of anti-TL1A variable heavy domain and variable light domain in Tables 29 and 31-34. In some embodiments, the VH1 or VL1 can comprise variants of any of the above in which an N-terminal glutamine or glutamate is replaced with pyroglutamate.

[0037] In some such antibodies, the VH2 and VL2 comprise a variable heavy domain comprising a vhCDR1, a vhCDR2, and a vhCDR3 contained within a variable heavy domain comprising the amino acid sequence of any one of SEQ ID NOS: 2233, 2235, and 179, and a variable light domain comprising a vlCDR1, a vlCDR2, and a vlCDR3 contained within a variable light domain comprising the amino acid sequence of any one of SEQ ID NOS: 2234, 2237, and 1248. In some such antibodies, the VH2 and VL2 comprise a variable heavy domain comprising a vhCDR1, a vhCDR2, and a vhCDR3 contained within a variable heavy domain comprising the amino acid sequence of SEQ ID NO: 2233, and a variable light domain comprising a vlCDR1, a vlCDR2, and a vlCDR3 contained within a variable light domain comprising the amino acid sequence of SEQ ID NO: 2234. In some such antibodies, the VH2 and VL2 comprise a variable heavy domain comprising a vhCDR1, a vhCDR2, and a vhCDR3 contained within a variable heavy domain comprising the amino acid sequence of SEQ ID NO: 2235, and a variable light domain comprising a vlCDR1, a vlCDR2, and a vlCDR3 contained within a variable light domain comprising the amino acid sequence of SEQ ID NO: 2237. In some such antibodies, the VH2 and VL2 comprise a variable heavy domain comprising a vhCDR1, a vhCDR2, and a vhCDR3 contained within a variable heavy domain comprising the amino acid sequence of SEQ ID NO: 179, and a variable light domain comprising a vlCDR1, a vlCDR2, and a vlCDR3 contained within a variable light domain comprising the amino acid sequence of SEQ ID NO: 1248. In some such antibodies, the VH2 and VL2 comprise a variable heavy domain comprising a vhCDR1, a vhCDR2, and a vhCDR3 contained within a variable heavy domain comprising the amino acid sequence of SEQ ID NO: 2113, and a variable light domain comprising a vlCDR1, a vlCDR2, and a vlCDR3 contained within a variable light domain comprising the amino acid sequence of SEQ ID NO: 2231. In some such antibodies, the VH2 and VL2 comprise a variable heavy domain comprising a vhCDR1, a vhCDR2, and a vhCDR3 contained within a variable heavy domain comprising the amino acid sequence of SEQ ID NO: 1967, and a variable light domain comprising a vlCDR1, a vlCDR2, and a vlCDR3 contained within a variable light domain comprising the amino acid sequence of SEQ ID NO: 1248. In some such antibodies, the VH2 and VL2 comprise a variable heavy domain comprising a vhCDR1, a vhCDR2, and a vhCDR3 and a variable light domain comprising a vlCDR1, a vlCDR2, and a vlCDR3 contained within a variable heavy domain and variable light domain pair in XENP53412, XENP53413, XENP53369, XENP53375, XENP53387, XENP53415, XENP53370, XENP53371, XENP53376, XENP53377, XENP53378, XENP53379, XENP53380, or XENP53414. In any of the above, optionally the CDRs are as defined by the Kabat, Chothia, Kabat+Chothia, AbM, contact, or IMGT definition.

[0038] In some such antibodies, the VH2 and VL2 comprise a variable heavy domain comprising a vhCDR1 comprising the amino acid sequence of SEQ ID NO: 180, a vhCDR2 comprising the amino acid sequence of SEQ ID NO: 181, and a vhCDR3 comprising the amino acid sequence of SEQ ID NO: 182 or 2236, and a variable light domain comprising a vlCDR1 comprising the amino acid sequence of SEQ ID NO: 184, a vlCDR2 comprising the amino acid sequence of SEQ ID NO: 1249 or 2238, and a vlCDR3 comprising the amino acid sequence of SEQ ID NO: 1250. In some such antibodies, the VH2 and VL2 comprise a variable heavy domain comprising a vhCDR1 comprising the amino acid sequence of SEQ ID NO: 180, a vhCDR2 comprising the amino acid sequence of SEQ ID NO: 181, and a vhCDR3 comprising the amino acid sequence of SEQ ID NO: 182, and a variable light domain comprising a vlCDR1 comprising the amino acid sequence of SEQ ID NO: 184, a vlCDR2 comprising the amino acid sequence of SEQ ID NO: 1249, and a vlCDR3 comprising the amino acid sequence of SEQ ID NO: 1250. In some such antibodies, the VH2 and VL2 comprise a variable heavy domain comprising a vhCDR1 comprising the amino acid sequence of SEQ ID NO: 180, a vhCDR2 comprising the amino acid sequence of SEQ ID NO: 181, and a vhCDR3 comprising the amino acid sequence of SEQ ID NO: 2236, and a variable light domain comprising a vlCDR1 comprising the amino acid sequence of SEQ ID NO: 184, a vlCDR2 comprising the amino acid sequence of SEQ ID NO: 2238, and a vlCDR3 comprising the amino acid sequence of SEQ ID NO: 1250. In some such antibodies, the VH2 and VL2 comprise a variable heavy domain comprising a vhCDR1 comprising the amino acid sequence of SEQ ID NO: 2239, a vhCDR2 comprising the amino acid sequence of SEQ ID NO: 181, and a vhCDR3 comprising the amino acid sequence of SEQ ID NO: 182, and a variable light domain comprising a vlCDR1 comprising the amino acid sequence of SEQ ID NO: 184, a vlCDR2 comprising the amino acid sequence of SEQ ID NO: 1249, and a vlCDR3 comprising the amino acid sequence of SEQ ID NO: 1250.

[0039] In some such antibodies, the VH2 is at least 90%, at least 95%, at least 96%, at least 97%, at least 98%, or at least 99% identical to the amino acid sequence of any one of SEQ ID NOS: 2233, 2235, and 179, and the VL2 is at least 90%, at least 95%, at least 96%, at least 97%, at least 98%, or at least 99% identical to the amino acid sequence of any one of SEQ ID NOS: 2234, 2237, and 1248. In some such antibodies, the VH2 is at least 90%, at least 95%, at least 96%, at least 97%, at least 98%, or at least 99% identical to the amino acid sequence of SEQ ID NO: 2233, and the VL2 is at least 90%, at least 95%, at least 96%, at least 97%, at least 98%, or at least 99% identical to the amino acid sequence of SEQ ID NO: 2234. In some such antibodies, the VH2 is at least 90%, at least 95%, at least 96%, at least 97%, at least 98%, or at least 99% identical to the amino acid sequence of SEQ ID NO: 2235, and the VL2 is at least 90%, at least 95%, at least 96%, at least 97%, at least 98%, or at least 99% identical to the amino acid sequence of SEQ ID NO: 2237. In some such antibodies, the VH2 is at least 90%, at least 95%, at least 96%, at least 97%, at least 98%, or at least 99% identical to the amino acid sequence of SEQ ID NO: 179, and the VL2 is at least 90%, at least 95%, at least 96%, at least 97%, at least 98%, or at least 99% identical to the amino acid sequence of SEQ ID NO: 1248. In some such antibodies, the VH2 is at least 90%, at least 95%, at least 96%, at least 97%, at least 98%, or at least 99% identical to the amino acid sequence of SEQ ID NO: 2113, and the VL2 is at least 90%, at least 95%, at least 96%, at least 97%, at least 98%, or at least 99% identical to the amino acid sequence of SEQ ID NO: 2231. In some such antibodies, the VH2 is at least 90%, at least 95%, at least 96%, at least 97%, at least 98%, or at least 99% identical to the amino acid sequence of SEQ ID NO: 1967, and the VL2 is at least 90%, at least 95%, at least 96%, at least 97%, at least 98%, or at least 99% identical to the amino acid sequence of SEQ ID NO: 1248. In some such antibodies, the VH2 is at least 90%, at least 95%, at least 96%, at least 97%, at least 98%, or at least 99% identical to the amino acid sequence of any one of SEQ ID NOS: 1927-2132, and the VL2 is at least 90%, at least 95%, at least 96%, at least 97%, at least 98%, or at least 99% identical to the amino acid sequence of any one of SEQ ID NOS: 2133-2232. In some such antibodies, the VH2 and the VL2 are at least 90%, at least 95%, at least 96%, at least 97%, at least 98%, or at least 99% identical to any pair of anti-IL23 variable heavy domain and variable light domain in XENP53412, XENP53413, XENP53369, XENP53375, XENP53387, XENP53415, XENP53370, XENP53371, XENP53376, XENP53377, XENP53378, XENP53379, XENP53380, or XENP53414. In some such antibodies, the VH2 and the VL2 are at least 90%, at least 95%, at least 96%, at least 97%, at least 98%, or at least 99% identical to any pair of anti-IL23 variable heavy domain and variable light domain in Table 29 or 33.

[0040] In some such antibodies, the VH2 comprises the amino acid sequence of any one of SEQ ID NOS: 2233, 2235, and 179, and the VL2 comprises the amino acid sequence of any one of SEQ ID NOS: 2234, 2237, and 1248. In some such antibodies, the VH2 comprises the amino acid sequence of SEQ ID NO: 2233, and the VL2 comprises the amino acid sequence of SEQ ID NO: 2234. In some such antibodies, the VH2 comprises the amino acid sequence of SEQ ID NO: 2235, and the VL2 comprises the amino acid sequence of SEQ ID NO: 2237. In some such antibodies, the VH2 comprises the amino acid sequence of SEQ ID NO: 179, and the VL2 comprises the amino acid sequence of SEQ ID NO: 1248. In some such antibodies, the VH2 comprises the amino acid sequence of SEQ ID NO: 2113, and the VL2 comprises the amino acid sequence of SEQ ID NO: 2231. In some such antibodies, the VH2 comprises the amino acid sequence of SEQ ID NO: 1967, and the VL2 comprises the amino acid sequence of SEQ ID NO: 1248. In some such antibodies, the VH2 comprises the amino acid sequence of any one of SEQ ID NOS: 1927-2132, and the VL2 comprises the amino acid sequence of any one of SEQ ID NOS: 2133-2232. In some such antibodies, the VH2 and the VL2 comprise any pair of anti-IL23 variable heavy domain and variable light domain in XENP53412, XENP53413, XENP53369, XENP53375, XENP53387, XENP53415, XENP53370, XENP53371, XENP53376, XENP53377, XENP53378, XENP53379, XENP53380, or XENP53414. In some such antibodies, the VH2 and the VL2 comprise any pair of anti-IL23 variable heavy domain and variable light domain in Table 29 or 33. In some such antibodies, the VH2 or VL2 can comprise variants of any of the above in which an N-terminal glutamine or glutamate is replaced with pyroglutamate.

[0041] In some such antibodies, the VH1 comprises a vhCDR1, a vhCDR2, and a vhCDR3 contained within a variable heavy domain comprising the amino acid sequence of any one of SEQ ID NOS: 2241, 2253, 2259, 1674, and 1200, (ii) the VL1 comprises a vlCDR1, a vlCDR2, and a vlCDR3 contained within a variable light domain comprising the amino acid sequence of any one of SEQ ID NOS: 2243 and 1204, (iii) the VH2 comprises a vhCDR1, a vhCDR2, and a vhCDR3 contained within a variable heavy domain comprising the amino acid sequence of any one of SEQ ID NOS: 2233, 2235, and 179, and (iv) the VL2 comprises a vlCDR1, a vlCDR2, and a vlCDR3 contained within a variable light domain comprising the amino acid sequence of any one of SEQ ID NOS: 2234, 2237, and 1248, optionally wherein the CDRs are as defined by the Kabat, Chothia, Kabat+Chothia, AbM, contact, or IMGT definition. In some such antibodies, the VH1 comprises a vhCDR1 comprising the amino acid sequence of SEQ ID NO: 102 or 1201, a vhCDR2 comprising the amino acid sequence of SEQ ID NO: 1924 or 1202, and a vhCDR3 comprising the amino acid sequence of SEQ ID NO: 1203 or 104, (ii) the VL1 comprises a vlCDR1 comprising the amino acid sequence of SEQ ID NO: 106, a vlCDR2 comprising the amino acid sequence of SEQ ID NO: 107, and a vlCDR3 comprising the amino acid sequence of SEQ ID NO: 108, (iii) the VH2 comprises a vhCDR1 comprising the amino acid sequence of SEQ ID NO: 180, a vhCDR2 comprising the amino acid sequence of SEQ ID NO: 181, and a vhCDR3 comprising the amino acid sequence of SEQ ID NO: 182 or 2236, and (iv) the VL2 comprises a vlCDR1 comprising the amino acid sequence of SEQ ID NO: 184, a vlCDR2 comprising the amino acid sequence of SEQ ID NO: 1249 or 2238, and a vlCDR3 comprising the amino acid sequence of SEQ ID NO: 1250. In some such antibodies, the VH1 comprises the amino acid sequence of any one of SEQ ID NOS: 2241, 2253, 2259, 1674, and 1200, (ii) the VL1 comprises the amino acid sequence of any one of SEQ ID NOS: 2243 and 1204, (iii) the VH2 comprises the amino acid sequence of any one of SEQ ID NOS: 2233, 2235, and 179, and (iv) the VL2 comprises the amino acid sequence of any one of SEQ ID NOS: 2234, 2237, and 1248, or variants thereof in which an N-terminal glutamine or glutamate is replaced with pyroglutamate. In some such antibodies, the bispecific antibody specifically binds human TL1A with a K_{D} of less than about 6.5E-11 M, less than about 6.4 E-11 M, or less than about 6.3E-11 as measured by surface plasmon resonance or Biacore at 25° C., optionally wherein the bispecific antibody specifically binds human TL1A with a K_{D} of less than about 3E-11 M, less than about 2.9E-11 M, less than about 2.8E-11 M, or less than about 2.7E-11 M. In some such antibodies, the bispecific antibody inhibits TL1A activity in a TL1A luciferase reporter assay with an IC₅₀ of less than about 4.5 nM. In some such antibodies, the bispecific antibody specifically binds human IL23 with a K_{D} of less than about 1.1E-10 M as measured by surface plasmon resonance or Biacore at 25° C., optionally wherein the bispecific antibody specifically binds human IL23 with a K_{D} of less than about 6E-11 M, less than about 5.9E-11 M, less than about 5.8E-11 M, or less than about 5.7E-11 M. In some such antibodies, the bispecific antibody inhibits IL23 activity in an IL23 luciferase reporter assay with an IC₅₀ of less than about 65 pM, less than about 64 pM, or less than about 63 pM, optionally wherein the bispecific antibody inhibits TL23 activity with an IC₅₀ of less than about 60 pM, less than about 59 pM, less than about 58 pM, less than about 57 pM, or less than about 56 pM.

[0042] In some such antibodies, the VH1 comprises a vhCDR1, a vhCDR2, and a vhCDR3 contained within a variable heavy domain comprising the amino acid sequence of SEQ ID NO: 2241, (ii) the VL1 comprises a vlCDR1, a vlCDR2, and a vlCDR3 contained within a variable light domain comprising the amino acid sequence of SEQ ID NO: 2243, (iii) the VH2 comprises a vhCDR1, a vhCDR2, and a vhCDR3 contained within a variable heavy domain comprising the amino acid sequence of SEQ ID NO: 2233, and (iv) the VL2 comprises a vlCDR1, a vlCDR2, and a vlCDR3 contained within a variable light domain comprising the amino acid sequence of SEQ ID NO: 2234, optionally wherein the CDRs are as defined by the Kabat, Chothia, Kabat+Chothia, AbM, contact, or IMGT definition. In some such antibodies, the VH1 comprises a vhCDR1 comprising the amino acid sequence of SEQ ID NO: 102, a vhCDR2 comprising the amino acid sequence of SEQ ID NO: 1924, and a vhCDR3 comprising the amino acid sequence of SEQ ID NO: 1203, (ii) the VL1 comprises a vlCDR1 comprising the amino acid sequence of SEQ ID NO: 106, a vlCDR2 comprising the amino acid sequence of SEQ ID NO: 107, and a vlCDR3 comprising the amino acid sequence of SEQ ID NO: 108, (iii) the VH2 comprises a vhCDR1 comprising the amino acid sequence of SEQ ID NO: 180, a vhCDR2 comprising the amino acid sequence of SEQ ID NO: 181, and a vhCDR3 comprising the amino acid sequence of SEQ ID NO: 182, and (iv) the VL2 comprises a vlCDR1 comprising the amino acid sequence of SEQ ID NO: 184, a vlCDR2 comprising the amino acid sequence of SEQ ID NO: 1249, and a vlCDR3 comprising the amino acid sequence of SEQ ID NO: 1250. In some such antibodies, the VH1 comprises the amino acid sequence of SEQ ID NO: 2241, (ii) the VL1 comprises the amino acid sequence of SEQ ID NO: 2243, (iii) the VH2 comprises the amino acid sequence of SEQ ID NO: 2233, and (iv) the VL2 comprises the amino acid sequence of SEQ ID NO: 2234, or variants thereof in which an N-terminal glutamine or glutamate is replaced with pyroglutamate. In some such antibodies, the bispecific antibody specifically binds human TL1A with a K_{D} of less than about 6.5E-11 M, less than about 6.4 E-11 M, or less than about 6.3E-11 as measured by surface plasmon resonance or Biacore at 25° C., optionally wherein the bispecific antibody specifically binds human TL1A with a K_{D} of less than about 3E-11 M, less than about 2.9E-11 M, less than about 2.8E-11 M, or less than about 2.7E-11 M. In some such antibodies, the bispecific antibody inhibits TL1A activity in a TL1A luciferase reporter assay with an IC₅₀ of less than about 4.5 nM. In some such antibodies, the bispecific antibody specifically binds human IL23 with a K_{D} of less than about 1.1E-10 M as measured by surface plasmon resonance or Biacore at 25° C., optionally wherein the bispecific antibody specifically binds human IL23 with a K_{D} of less than about 6E-11 M, less than about 5.9E-11 M, less than about 5.8E-11 M, or less than about 5.7E-11 M. In some such antibodies, the bispecific antibody inhibits IL23 activity in an IL23 luciferase reporter assay with an IC₅₀ of less than about 65 pM, less than about 64 pM, or less than about 63 pM, optionally wherein the bispecific antibody inhibits IL23 activity with an IC₅₀ of less than about 60 pM, less than about 59 pM, less than about 58 pM, less than about 57 pM, or less than about 56 pM.

[0043] In some such antibodies, the VH1 comprises a vhCDR1, a vhCDR2, and a vhCDR3 contained within a variable heavy domain comprising the amino acid sequence of SEQ ID NO: 2241, (ii) the VL1 comprises a vlCDR1, a vlCDR2, and a vlCDR3 contained within a variable light domain comprising the amino acid sequence of SEQ ID NO: 2243, (iii) the VH2 comprises a vhCDR1, a vhCDR2, and a vhCDR3 contained within a variable heavy domain comprising the amino acid sequence of SEQ ID NO: 2235, and (iv) the VL2 comprises a vlCDR1, a vlCDR2, and a vlCDR3 contained within a variable light domain comprising the amino acid sequence of SEQ ID NO: 2237. In some such antibodies, the VH1 comprises a vhCDR1 comprising the amino acid sequence of SEQ ID NO: 102, a vhCDR2 comprising the amino acid sequence of SEQ ID NO: 1924, and a vhCDR3 comprising the amino acid sequence of SEQ ID NO: 1203, (ii) the VL1 comprises a vlCDR1 comprising the amino acid sequence of SEQ ID NO: 106, a vlCDR2 comprising the amino acid sequence of SEQ ID NO: 107, and a vlCDR3 comprising the amino acid sequence of SEQ ID NO: 108, (iii) the VH2 comprises a vhCDR1 comprising the amino acid sequence of SEQ ID NO: 180, a vhCDR2 comprising the amino acid sequence of SEQ ID NO: 181, and a vhCDR3 comprising the amino acid sequence of SEQ ID NO: 2236, and (iv) the VL2 comprises a vlCDR1 comprising the amino acid sequence of SEQ ID NO: 184, a vlCDR2 comprising the amino acid sequence of SEQ ID NO: 2238, and a vlCDR3 comprising the amino acid sequence of SEQ ID NO: 1250. In some such antibodies, the VH1 comprises the amino acid sequence of SEQ ID NO: 2241, (ii) the VL1 comprises the amino acid sequence of SEQ ID NO: 2243, (iii) the VH2 comprises the amino acid sequence of SEQ ID NO: 2235, and (iv) the VL2 comprises the amino acid sequence of SEQ ID NO: 2237, or variants thereof in which an N-terminal glutamine or glutamate is replaced with pyroglutamate.

[0044] In some such antibodies, the VH1 comprises a vhCDR1, a vhCDR2, and a vhCDR3 contained within a variable heavy domain comprising the amino acid sequence of SEQ ID NO: 2253, (ii) the VL1 comprises a vlCDR1, a vlCDR2, and a vlCDR3 contained within a variable light domain comprising the amino acid sequence of SEQ ID NO: 2243, (iii) the VH2 comprises a vhCDR1, a vhCDR2, and a vhCDR3 contained within a variable heavy domain comprising the amino acid sequence of SEQ ID NO: 2233, and (iv) the VL2 comprises a vlCDR1, a vlCDR2, and a vlCDR3 contained within a variable light domain comprising the amino acid sequence of SEQ ID NO: 2234, optionally wherein the CDRs are as defined by the Kabat, Chothia, Kabat+Chothia, AbM, contact, or IMGT definition. In some such antibodies, the VH1 comprises a vhCDR1 comprising the amino acid sequence of SEQ ID NO: 1201, a vhCDR2 comprising the amino acid sequence of SEQ ID NO: 1202, and a vhCDR3 comprising the amino acid sequence of SEQ ID NO: 1203, (ii) the VL1 comprises a vlCDR1 comprising the amino acid sequence of SEQ ID NO: 106, a vlCDR2 comprising the amino acid sequence of SEQ ID NO: 107, and a vlCDR3 comprising the amino acid sequence of SEQ ID NO: 108, (iii) the VH2 comprises a vhCDR1 comprising the amino acid sequence of SEQ ID NO: 180, a vhCDR2 comprising the amino acid sequence of SEQ ID NO: 181, and a vhCDR3 comprising the amino acid sequence of SEQ ID NO: 182, and (iv) the VL2 comprises a vlCDR1 comprising the amino acid sequence of SEQ ID NO: 184, a vlCDR2 comprising the amino acid sequence of SEQ ID NO: 1249, and a vlCDR3 comprising the amino acid sequence of SEQ ID NO: 1250. In some such antibodies, the VH1 comprises the amino acid sequence of SEQ ID NO: 2253, (ii) the VL1 comprises the amino acid sequence of SEQ ID NO: 2243, (iii) the VH2 comprises the amino acid sequence of SEQ ID NO: 2233, and (iv) the VL2 comprises the amino acid sequence of SEQ ID NO: 2234, or variants thereof in which an N-terminal glutamine or glutamate is replaced with pyroglutamate.

[0045] In some such antibodies, the VH1 comprises a vhCDR1, a vhCDR2, and a vhCDR3 contained within a variable heavy domain comprising the amino acid sequence of SEQ ID NO: 2259, (ii) the VL1 comprises a vlCDR1, a vlCDR2, and a vlCDR3 contained within a variable light domain comprising the amino acid sequence of SEQ ID NO: 2243, (iii) the VH2 comprises a vhCDR1, a vhCDR2, and a vhCDR3 contained within a variable heavy domain comprising the amino acid sequence of SEQ ID NO: 2233, and (iv) the VL2 comprises a vlCDR1, a vlCDR2, and a vlCDR3 contained within a variable light domain comprising the amino acid sequence of SEQ ID NO: 2234, optionally wherein the CDRs are as defined by the Kabat, Chothia, Kabat+Chothia, AbM, contact, or IMGT definition. In some such antibodies, the VH1 comprises a vhCDR1 comprising the amino acid sequence of SEQ ID NO: 102, a vhCDR2 comprising the amino acid sequence of SEQ ID NO: 1924, and a vhCDR3 comprising the amino acid sequence of SEQ ID NO: 104, (ii) the VL1 comprises a vlCDR1 comprising the amino acid sequence of SEQ ID NO: 106, a vlCDR2 comprising the amino acid sequence of SEQ ID NO: 107, and a vlCDR3 comprising the amino acid sequence of SEQ ID NO: 108, (iii) the VH2 comprises a vhCDR1 comprising the amino acid sequence of SEQ ID NO: 180, a vhCDR2 comprising the amino acid sequence of SEQ ID NO: 181, and a vhCDR3 comprising the amino acid sequence of SEQ ID NO: 182, and (iv) the VL2 comprises a vlCDR1 comprising the amino acid sequence of SEQ ID NO: 184, a vlCDR2 comprising the amino acid sequence of SEQ ID NO: 1249, and a vlCDR3 comprising the amino acid sequence of SEQ ID NO: 1250. In some such antibodies, the VH1 comprises the amino acid sequence of SEQ ID NO: 2259, (ii) the VL1 comprises the amino acid sequence of SEQ ID NO: 2243, (iii) the VH2 comprises the amino acid sequence of SEQ ID NO: 2233, and (iv) the VL2 comprises the amino acid sequence of SEQ ID NO: 2234, or variants thereof in which an N-terminal glutamine or glutamate is replaced with pyroglutamate.

[0046] In some such antibodies, the VH1 comprises a vhCDR1, a vhCDR2, and a vhCDR3 contained within a variable heavy domain comprising the amino acid sequence of SEQ ID NO: 1674, (ii) the VL1 comprises a vlCDR1, a vlCDR2, and a vlCDR3 contained within a variable light domain comprising the amino acid sequence of SEQ ID NO: 1204, (iii) the VH2 comprises a vhCDR1, a vhCDR2, and a vhCDR3 contained within a variable heavy domain comprising the amino acid sequence of SEQ ID NO: 179, and (iv) the VL2 comprises a vlCDR1, a vlCDR2, and a vlCDR3 contained within a variable light domain comprising the amino acid sequence of SEQ ID NO: 1248, optionally wherein the CDRs are as defined by the Kabat, Chothia, Kabat+Chothia, AbM, contact, or IMGT definition. In some such antibodies, the VH1 comprises a vhCDR1 comprising the amino acid sequence of SEQ ID NO: 102, a vhCDR2 comprising the amino acid sequence of SEQ ID NO: 1924, and a vhCDR3 comprising the amino acid sequence of SEQ ID NO: 1203, (ii) the VL1 comprises a vlCDR1 comprising the amino acid sequence of SEQ ID NO: 106, a vlCDR2 comprising the amino acid sequence of SEQ ID NO: 107, and a vlCDR3 comprising the amino acid sequence of SEQ ID NO: 108, (iii) the VH2 comprises a vhCDR1 comprising the amino acid sequence of SEQ ID NO: 180, a vhCDR2 comprising the amino acid sequence of SEQ ID NO: 181, and a vhCDR3 comprising the amino acid sequence of SEQ ID NO: 182, and (iv) the VL2 comprises a vlCDR1 comprising the amino acid sequence of SEQ ID NO: 184, a vlCDR2 comprising the amino acid sequence of SEQ ID NO: 1249, and a vlCDR3 comprising the amino acid sequence of SEQ ID NO: 1250. In some such antibodies, the VH1 comprises the amino acid sequence of SEQ ID NO: 1674, (ii) the VL1 comprises the amino acid sequence of SEQ ID NO: 1204, (iii) the VH2 comprises the amino acid sequence of SEQ ID NO: 179, and (iv) the VL2 comprises the amino acid sequence of SEQ ID NO: 1248, or variants thereof in which an N-terminal glutamine or glutamate is replaced with pyroglutamate.

[0047] In some such antibodies, the VH1 comprises a vhCDR1, a vhCDR2, and a vhCDR3 contained within a variable heavy domain comprising the amino acid sequence of SEQ ID NO: 1200, (ii) the VL1 comprises a vlCDR1, a vlCDR2, and a vlCDR3 contained within a variable light domain comprising the amino acid sequence of SEQ ID NO: 1204, (iii) the VH2 comprises a vhCDR1, a vhCDR2, and a vhCDR3 contained within a variable heavy domain comprising the amino acid sequence of SEQ ID NO: 179, and (iv) the VL2 comprises a vlCDR1, a vlCDR2, and a vlCDR3 contained within a variable light domain comprising the amino acid sequence of SEQ ID NO: 1248, optionally wherein the CDRs are as defined by the Kabat, Chothia, Kabat+Chothia, AbM, contact, or IMGT definition. In some such antibodies, the VH1 comprises a vhCDR1 comprising the amino acid sequence of SEQ ID NO: 1201, a vhCDR2 comprising the amino acid sequence of SEQ ID NO: 1202, and a vhCDR3 comprising the amino acid sequence of SEQ ID NO: 1203, (ii) the VL1 comprises a vlCDR1 comprising the amino acid sequence of SEQ ID NO: 106, a vlCDR2 comprising the amino acid sequence of SEQ ID NO: 107, and a vlCDR3 comprising the amino acid sequence of SEQ ID NO: 108, (iii) the VH2 comprises a vhCDR1 comprising the amino acid sequence of SEQ ID NO: 180, a vhCDR2 comprising the amino acid sequence of SEQ ID NO: 181, and a vhCDR3 comprising the amino acid sequence of SEQ ID NO: 182, and (iv) the VL2 comprises a vlCDR1 comprising the amino acid sequence of SEQ ID NO: 184, a vlCDR2 comprising the amino acid sequence of SEQ ID NO: 1249, and a vlCDR3 comprising the amino acid sequence of SEQ ID NO: 1250. In some such antibodies, the VH1 comprises the amino acid sequence SEQ ID NO: 1200, (ii) the VL1 comprises the amino acid sequence of SEQ ID NO: 1204, (iii) the VH2 comprises the amino acid sequence of SEQ ID NO: 179, and (iv) the VL2 comprises the amino acid sequence of SEQ ID NO: 1248, or variants thereof in which an N-terminal glutamine or glutamate is replaced with pyroglutamate.

[0048] In some such antibodies, the bispecific antibody comprises (i) a first heavy chain comprising the VH1 and a first heavy chain constant domain, (ii) a first light chain comprising the VL1 and a first light chain constant domain, (iii) a second heavy chain comprising the VH2 and a second heavy chain constant domain, and (iv) a second light chain comprising the VL2 and a second light chain constant domain. In some such antibodies, the first heavy chain constant domain and the second heavy chain constant domain comprise a set of heterodimerization skew variants. In some such antibodies, the first heavy chain constant domain and the second heavy chain constant domain each comprise one or more ablation variants. In some such antibodies, the first heavy chain constant domain or the second heavy chain constant domain comprises one or more pI variants. In some such antibodies, the first heavy chain constant domain comprises amino acid substitutions E233P/L234V/L235A/G236del/S267K and/or the second heavy chain constant domain comprises amino acid substitutions E233P/L234V/L235A/G236del/S267K, wherein numbering is according to EU numbering. In some such antibodies, the first heavy chain constant domain comprises amino acid substitutions M428L/N434S and/or the second heavy chain constant domain comprises amino acid substitutions M428L/N434S, wherein numbering is according to EU numbering. In some such antibodies, the first heavy chain constant domain comprises amino acid substitutions E233P/L234V/L235A/G236del/S267K and M428L/N434S and/or the second heavy chain constant domain comprises amino acid substitutions E233P/L234V/L235A/G236del/S267K and M428L/N434S, wherein numbering is according to EU numbering. In some such antibodies, the first heavy chain constant domain or the second heavy chain constant domain comprises amino acid substitutions L368D/K370S, wherein numbering is according to EU numbering. In some such antibodies, the first heavy chain constant domain or the second heavy chain constant domain comprises amino acid substitutions N208D/Q295E/N384D/Q418E/N421D, wherein numbering is according to EU numbering. In some such antibodies, the first heavy chain constant domain or the second heavy chain constant domain comprises amino acid substitutions E233P/L234V/L235A/G236del/S267K, M428L/N434S, L368D/K370S, and N208D/Q295E/N384D/Q418E/N421D, wherein numbering is according to EU numbering. In some such antibodies, the first heavy chain constant domain or the second heavy chain constant domain comprises amino acid substitutions E357Q/S364K, wherein numbering is according to EU numbering. In some such antibodies, the first heavy chain constant domain comprises amino acid substitutions L368D/K370S, and the second heavy chain constant domain comprises amino acid substitutions E357Q/S364K, wherein numbering is according to EU numbering. In some such antibodies, the first heavy chain constant domain or the second heavy chain constant domain comprises amino acid substitutions E233P/L234V/L235A/G236del/S267K, M428L/N434S, and E357Q/S364K, wherein numbering is according to EU numbering. In some such antibodies, the first heavy chain constant domain comprises amino acid substitutions E233P/L234V/L235A/G236del/S267K, M428L/N434S, L368D/K370S, and N208D/Q295E/N384D/Q418E/N421D, wherein numbering is according to EU numbering, and the second heavy chain constant domain comprises amino acid substitutions E233P/L234V/L235A/G236del/S267K, M428L/N434S, and E357Q/S364K, wherein numbering is according to EU numbering.

[0049] In some such antibodies, the first heavy chain constant domain is of isotype IgG1, and the second heavy chain constant domain is of isotype IgG1. In some such antibodies, the bispecific antibody is a chimeric or humanized bispecific antibody.

[0050] In some such antibodies, the bispecific antibody specifically binds human TL1A with a K_{D} of less than about 6.5E-11 M, less than about 6.4 E-11 M, or less than about 6.3E-11 as measured by surface plasmon resonance or Biacore at 25° C., optionally wherein the bispecific antibody specifically binds human TL1A with a K_{D} of less than about 3E-11 M, less than about 2.9E-11 M, less than about 2.8E-11 M, or less than about 2.7E-11 M. In some such antibodies, the bispecific antibody inhibits TL1A activity in a TL1A luciferase reporter assay with an IC₅₀ of less than about 4.5 nM. In some such antibodies, the bispecific antibody specifically binds human IL23 with a K_{D} of less than about 1.1E-10 M as measured by surface plasmon resonance or Biacore at 25° C., optionally wherein the bispecific antibody specifically binds human IL23 with a K_{D} of less than about 6E-11 M, less than about 5.9E-11 M, less than about 5.8E-11 M, or less than about 5.7E-11 M. In some such antibodies, the bispecific antibody inhibits IL23 activity in an IL23 luciferase reporter assay with an IC₅₀ of less than about 65 pM, less than about 64 pM, or less than about 63 pM, optionally wherein the bispecific antibody inhibits IL23 activity with an IC₅₀ of less than about 60 pM, less than about 59 pM, less than about 58 pM, less than about 57 pM, or less than about 56 pM.

[0051] In another aspect, provided are bispecific or heterodimeric antibodies comprising (a) a first monomer comprising a first heavy chain comprising a VH1-CH1-hinge-CH2-CH3, wherein VH1 is a first variable heavy domain, CH1-hinge-CH2-CH3 is a first heavy chain constant domain, and CH2-CH3 is a first Fc domain; (b) a second monomer comprising a second heavy chain comprising a VH2-CH1-hinge-CH2-CH3, wherein VH2 is a second variable domain, CH1-hinge-CH2-CH3 is a second heavy chain constant domain, and CH2-CH3 is a second Fc domain; (c) a first light chain comprising a VL1-CL, wherein VL1 is a first variable light domain, and CL is a first light chain constant domain; and (d) a second light chain comprising a VL2-CL, wherein VL2 is a second variable light domain, and CL is a second light chain constant domain, wherein the VH1 and VL1 together form a first antigen-binding domain (ABD), and the VH2 and the VL2 together form a second ABD, wherein the first ABD is a TL1A-binding domain and the second ABD is an IL23-binding domain, or wherein the first ABD is an IL23-binding domain and the second ABD is a TL1A-binding domain, and wherein: (i) the first heavy chain constant domain and the first light chain constant domain comprise a set of electrostatic steering variants at positions 213 and 218 of the first heavy chain constant domain according to EU numbering and positions 122 and 123 of the first light chain constant domain according to Kabat numbering, or a set of steric skew variants at position 141 of the first heavy chain constant domain according to EU numbering and position 118 of the first light chain constant domain according to Kabat numbering, at position 141 of the first heavy chain constant domain according to EU numbering and position 116 of the first light chain constant domain according to Kabat numbering, or at position 147 of the first heavy chain constant domain according to EU numbering and position 131 of the first light chain constant domain according to Kabat numbering; and/or (ii) the VH1 and the VL1 comprise a set of electrostatic steering variants at position 39 of VH1 and position 38 of VL1 according to Kabat numbering; and/or (iii) the second heavy chain constant domain and the second light chain constant domain comprise a set of electrostatic steering variants at positions 213 and 218 of the second heavy chain constant domain according to EU numbering and positions 122 and 123 of the second light chain constant domain according to Kabat numbering, or a set of steric skew variants at position 141 of the second heavy chain constant domain according to EU numbering and position 118 of the second light chain constant domain according to Kabat numbering, at position 141 of the second heavy chain constant domain according to EU numbering and position 116 of the second light chain constant domain according to Kabat numbering, or at position 147 of the second heavy chain constant domain according to EU numbering and position 131 of the second light chain constant domain according to Kabat numbering; and/or (iv) the VH2 and the VL2 comprise a set of electrostatic steering variants at position 39 of VH2 and position 38 of VL2 according to Kabat numbering. For example, any of the above antibodies can be in this format.

[0052] In some such antibodies, the first heavy chain constant domain and the first light chain constant domain comprise a set of electrostatic steering variants as depicted in FIG. 4 or Table 27 or a set of steric skew variants as depicted in FIG. 5 or Table 28. In some such antibodies, the VH1 and the VL1 comprise a set of electrostatic steering variants as depicted in FIG. 6 or Table 18 or 19. In some such antibodies, the second heavy chain constant domain and the second light chain constant domain comprise a set of electrostatic steering variants as depicted in FIG. 4 or Table 27 or a set of steric skew variants as depicted in FIG. 5 or Table 28. In some such antibodies, the VH2 and the VL2 comprise a set of electrostatic steering variants as depicted in FIG. 6 or Table 18 or 19.

[0053] In some such antibodies, the VH1 comprises amino acid substitution Q39E and the VL1 comprises amino acid substitution Q38K according to Kabat numbering. In some such antibodies, the VH2 comprises amino acid substitution Q39K and the VL2 comprises amino acid substitution Q38E according to Kabat numbering. In some such antibodies, the VH1 comprises amino acid substitution Q39E, the VL1 comprises amino acid substitution Q38K, the VH2 comprises amino acid substitution Q39K, and the VL2 comprises amino acid substitution Q38E according to Kabat numbering.

[0054] In some such antibodies, the first heavy chain constant domain comprises amino acid substitutions K213E/K218D according to EU numbering, and the first light chain constant domain comprises amino acid substitutions D122K/E123K according to Kabat numbering. In some such antibodies, the second heavy chain constant domain comprises amino acid substitution A141F according to EU numbering, and the second light chain constant domain comprises amino acid substitution F118A according to Kabat numbering. In some such antibodies, (a) the VH1 comprises amino acid substitution Q39E, the VL1 comprises amino acid substitution Q38K, the VH2 comprises amino acid substitution Q39K, and the VL2 comprises amino acid substitution Q38E according to Kabat numbering; (b) the first heavy chain constant domain comprises amino acid substitutions K213E/K218D according to EU numbering, and the first light chain constant domain comprises amino acid substitutions D122K/E123K according to Kabat numbering; and (c) the second heavy chain constant domain comprises amino acid substitution A141F according to EU numbering, and the second light chain constant domain comprises amino acid substitution F118A according to Kabat numbering.

[0055] In some such antibodies, the first ABD is a TL1A-binding domain and the second ABD is an IL23-binding domain.

[0056] In some such antibodies, the VH1 and VL1 comprise a variable heavy domain comprising a vhCDR1, a vhCDR2, and a vhCDR3 contained within a variable heavy domain comprising the amino acid sequence of any one of SEQ ID NOS: 2241, 2253, 2259, 1674, and 1200, and a variable light domain comprising a vlCDR1, a vlCDR2, and a vlCDR3 contained within a variable light domain comprising the amino acid sequence of any one of SEQ ID NOS: 2243 and 1204. In some such antibodies, the VH1 and VL1 comprise a variable heavy domain comprising a vhCDR1, a vhCDR2, and a vhCDR3 contained within a variable heavy domain comprising the amino acid sequence of SEQ ID NO: 2241, and a variable light domain comprising a vlCDR1, a vlCDR2, and a vlCDR3 contained within a variable light domain comprising the amino acid sequence of SEQ ID NO: 2243. In some such antibodies, the VH1 and VL1 comprise a variable heavy domain comprising a vhCDR1, a vhCDR2, and a vhCDR3 contained within a variable heavy domain comprising the amino acid sequence of SEQ ID NO: 2253, and a variable light domain comprising a vlCDR1, a vlCDR2, and a vlCDR3 contained within a variable light domain comprising the amino acid sequence of SEQ ID NO: 2243. In some such antibodies, the VH1 and VL1 comprise a variable heavy domain comprising a vhCDR1, a vhCDR2, and a vhCDR3 contained within a variable heavy domain comprising the amino acid sequence of SEQ ID NO: 2259, and a variable light domain comprising a vlCDR1, a vlCDR2, and a vlCDR3 contained within a variable light domain comprising the amino acid sequence of SEQ ID NO: 2243. In some such antibodies, the VH1 and VL1 comprise a variable heavy domain comprising a vhCDR1, a vhCDR2, and a vhCDR3 contained within a variable heavy domain comprising the amino acid sequence of SEQ ID NO: 1674, and a variable light domain comprising a vlCDR1, a vlCDR2, and a vlCDR3 contained within a variable light domain comprising the amino acid sequence of SEQ ID NO: 1204. In some such antibodies, the VH1 and VL1 comprise a variable heavy domain comprising a vhCDR1, a vhCDR2, and a vhCDR3 contained within a variable heavy domain comprising the amino acid sequence of SEQ ID NO: 1200, and a variable light domain comprising a vlCDR1, a vlCDR2, and a vlCDR3 contained within a variable light domain comprising the amino acid sequence of SEQ ID NO: 1204. In some such antibodies, the VH1 and VL1 comprise a variable heavy domain comprising a vhCDR1, a vhCDR2, and a vhCDR3 contained within a variable heavy domain comprising the amino acid sequence of any one of SEQ ID NOS: 1427-1823 and 2316-2330, and a variable light domain comprising a vlCDR1, a vlCDR2, and a vlCDR3 contained within a variable light domain comprising the amino acid sequence of any one of SEQ ID NOS: 1824-1923. In some such antibodies, the VH1 and VL1 comprise a variable heavy domain comprising a vhCDR1, a vhCDR2, and a vhCDR3 contained within a variable heavy domain comprising the amino acid sequence of any one of SEQ ID NOS: 1674, 1200, 1661, and 2323, and a variable light domain comprising a vlCDR1, a vlCDR2, and a vlCDR3 contained within a variable light domain comprising the amino acid sequence of SEQ ID NO: 1204. In some such antibodies, the VH1 and VL1 comprise a variable heavy domain comprising a vhCDR1, a vhCDR2, and a vhCDR3 contained within a variable heavy domain comprising the amino acid sequence of SEQ ID NO: 1661, and a variable light domain comprising a vlCDR1, a vlCDR2, and a vlCDR3 contained within a variable light domain comprising the amino acid sequence of SEQ ID NO: 1204. In some such antibodies, the VH1 and VL1 comprise a variable heavy domain comprising a vhCDR1, a vhCDR2, and a vhCDR3 contained within a variable heavy domain comprising the amino acid sequence of SEQ ID NO: 2323, and a variable light domain comprising a vlCDR1, a vlCDR2, and a vlCDR3 contained within a variable light domain comprising the amino acid sequence of SEQ ID NO: 1204. In some such antibodies, the VH1 and VL1 comprise a variable heavy domain comprising a vhCDR1, a vhCDR2, and a vhCDR3 contained within a variable heavy domain comprising the amino acid sequence of SEQ ID NO: 101, and a variable light domain comprising a vlCDR1, a vlCDR2, and a vlCDR3 contained within a variable light domain comprising the amino acid sequence of SEQ ID NO: 105. In some such antibodies, the VH1 and VL1 comprise a variable heavy domain comprising a vhCDR1, a vhCDR2, and a vhCDR3 contained within a variable heavy domain comprising the amino acid sequence of SEQ ID NO: 109, and a variable light domain comprising a vlCDR1, a vlCDR2, and a vlCDR3 contained within a variable light domain comprising the amino acid sequence of SEQ ID NO: 113. In some such antibodies, the VH1 and VL1 comprise a variable heavy domain comprising a vhCDR1, a vhCDR2, and a vhCDR3 contained within a variable heavy domain comprising the amino acid sequence of SEQ ID NO: 117, and a variable light domain comprising a vlCDR1, a vlCDR2, and a vlCDR3 contained within a variable light domain comprising the amino acid sequence of SEQ ID NO: 121. In some such antibodies, the VH1 and VL1 comprise a variable heavy domain comprising a vhCDR1, a vhCDR2, and a vhCDR3 contained within a variable heavy domain comprising the amino acid sequence of SEQ ID NO: 125, and a variable light domain comprising a vlCDR1, a vlCDR2, and a vlCDR3 contained within a variable light domain comprising the amino acid sequence of SEQ ID NO: 129. In some such antibodies, the VH1 and VL1 comprise a variable heavy domain comprising a vhCDR1, a vhCDR2, and a vhCDR3 contained within a variable heavy domain comprising the amino acid sequence of SEQ ID NO: 133, and a variable light domain comprising a vlCDR1, a vlCDR2, and a vlCDR3 contained within a variable light domain comprising the amino acid sequence of SEQ ID NO: 137. In some such antibodies, the VH1 and VL1 comprise a variable heavy domain comprising a vhCDR1, a vhCDR2, and a vhCDR3 contained within a variable heavy domain comprising the amino acid sequence of SEQ ID NO: 141, and a variable light domain comprising a vlCDR1, a vlCDR2, and a vlCDR3 contained within a variable light domain comprising the amino acid sequence of SEQ ID NO: 145. In some such antibodies, the VH1 and VL1 comprise a variable heavy domain comprising a vhCDR1, a vhCDR2, and a vhCDR3 contained within a variable heavy domain comprising the amino acid sequence of SEQ ID NO: 149, and a variable light domain comprising a vlCDR1, a vlCDR2, and a vlCDR3 contained within a variable light domain comprising the amino acid sequence of SEQ ID NO: 153. In some such antibodies, the VH1 and VL1 comprise a variable heavy domain comprising a vhCDR1, a vhCDR2, and a vhCDR3 contained within a variable heavy domain comprising the amino acid sequence of SEQ ID NO: 157, and a variable light domain comprising a vlCDR1, a vlCDR2, and a vlCDR3 contained within a variable light domain comprising the amino acid sequence of SEQ ID NO: 159. In some such antibodies, the VH1 and VL1 comprise a variable heavy domain comprising a vhCDR1, a vhCDR2, and a vhCDR3 contained within a variable heavy domain comprising the amino acid sequence of SEQ ID NO: 161, and a variable light domain comprising a vlCDR1, a vlCDR2, and a vlCDR3 contained within a variable light domain comprising the amino acid sequence of SEQ ID NO: 165. In some such antibodies, the VH1 and VL1 comprise a variable heavy domain comprising a vhCDR1, a vhCDR2, and a vhCDR3 contained within a variable heavy domain comprising the amino acid sequence of SEQ ID NO: 169, and a variable light domain comprising a vlCDR1, a vlCDR2, and a vlCDR3 contained within a variable light domain comprising the amino acid sequence of SEQ ID NO: 173. In some such antibodies, the VH1 and VL1 comprise a variable heavy domain comprising a vhCDR1, a vhCDR2, and a vhCDR3 and a variable light domain comprising a vlCDR1, a vlCDR2, and a vlCDR3 contained within any pair of anti-TL1A variable heavy domain and variable light domain in XENP53412, XENP53413, XENP53369, XENP53375, XENP53387, XENP53415, XENP53370, XENP53371, XENP53376, XENP53377, XENP53378, XENP53379, XENP53380, or XENP53414. In some such antibodies, the VH1 and VL1 comprise a variable heavy domain comprising a vhCDR1, a vhCDR2, and a vhCDR3 and a variable light domain comprising a vlCDR1, a vlCDR2, and a vlCDR3 contained within any pair of anti-TL1A variable heavy domain and variable light domain in Tables 26 and 29-34. Optionally, the CDRs in any of the above antibodies are as defined by the Kabat, Chothia, Kabat+Chothia, AbM, contact, or IMGT definition.

[0057] In some such antibodies, the VH1 and VL1 comprise a variable heavy domain comprising a vhCDR1 comprising the amino acid sequence of SEQ ID NO: 102 or 1201, a vhCDR2 comprising the amino acid sequence of SEQ ID NO: 1924 or 1202, and a vhCDR3 comprising the amino acid sequence of SEQ ID NO: 1203 or 104, and a variable light domain comprising a vlCDR1 comprising the amino acid sequence of SEQ ID NO: 106, a vlCDR2 comprising the amino acid sequence of SEQ ID NO: 107, and a vlCDR3 comprising the amino acid sequence of SEQ ID NO: 108. In some such antibodies, the VH1 and VL1 comprise a variable heavy domain comprising a vhCDR1 comprising the amino acid sequence of SEQ ID NO: 102, a vhCDR2 comprising the amino acid sequence of SEQ ID NO: 1924, and a vhCDR3 comprising the amino acid sequence of SEQ ID NO: 1203, and a variable light domain comprising a vlCDR1 comprising the amino acid sequence of SEQ ID NO: 106, a vlCDR2 comprising the amino acid sequence of SEQ ID NO: 107, and a vlCDR3 comprising the amino acid sequence of SEQ ID NO: 108. In some such antibodies, the VH1 and VL1 comprise a variable heavy domain comprising a vhCDR1 comprising the amino acid sequence of SEQ ID NO: 1201, a vhCDR2 comprising the amino acid sequence of SEQ ID NO: 1202, and a vhCDR3 comprising the amino acid sequence of SEQ ID NO: 1203, and a variable light domain comprising a vlCDR1 comprising the amino acid sequence of SEQ ID NO: 106, a vlCDR2 comprising the amino acid sequence of SEQ ID NO: 107, and a vlCDR3 comprising the amino acid sequence of SEQ ID NO: 108. In some such antibodies, the VH1 and VL1 comprise a variable heavy domain comprising a vhCDR1 comprising the amino acid sequence of SEQ ID NO: 102, a vhCDR2 comprising the amino acid sequence of SEQ ID NO: 1924, and a vhCDR3 comprising the amino acid sequence of SEQ ID NO: 104, and a variable light domain comprising a vlCDR1 comprising the amino acid sequence of SEQ ID NO: 106, a vlCDR2 comprising the amino acid sequence of SEQ ID NO: 107, and a vlCDR3 comprising the amino acid sequence of SEQ ID NO: 108. In some such antibodies, the VH1 and VL1 comprise a variable heavy domain comprising a vhCDR1 comprising the amino acid sequence of SEQ ID NO: 102, a vhCDR2 comprising the amino acid sequence of SEQ ID NO: 1926, and a vhCDR3 comprising the amino acid sequence of SEQ ID NO: 104, and a variable light domain comprising a vlCDR1 comprising the amino acid sequence of SEQ ID NO: 106, a vlCDR2 comprising the amino acid sequence of SEQ ID NO: 107, and a vlCDR3 comprising the amino acid sequence of SEQ ID NO: 108. In some such antibodies, the VH1 and VL1 comprise a variable heavy domain comprising a vhCDR1 comprising the amino acid sequence of SEQ ID NO: 102, a vhCDR2 comprising the amino acid sequence of SEQ ID NO: 103, and a vhCDR3 comprising the amino acid sequence of SEQ ID NO: 104, and a variable light domain comprising a vlCDR1 comprising the amino acid sequence of SEQ ID NO: 106, a vlCDR2 comprising the amino acid sequence of SEQ ID NO: 107, and a vlCDR3 comprising the amino acid sequence of SEQ ID NO: 108. In some such antibodies, the VH1 and VL1 comprise a variable heavy domain comprising a vhCDR1 comprising the amino acid sequence of SEQ ID NO: 110, a vhCDR2 comprising the amino acid sequence of SEQ ID NO: 111, and a vhCDR3 comprising the amino acid sequence of SEQ ID NO: 112, and a variable light domain comprising a vlCDR1 comprising the amino acid sequence of SEQ ID NO: 114, a vlCDR2 comprising the amino acid sequence of SEQ ID NO: 115, and a vlCDR3 comprising the amino acid sequence of SEQ ID NO: 116. In some such antibodies, the VH1 and VL1 comprise a variable heavy domain comprising a vhCDR1 comprising the amino acid sequence of SEQ ID NO: 118, a vhCDR2 comprising the amino acid sequence of SEQ ID NO: 119, and a vhCDR3 comprising the amino acid sequence of SEQ ID NO: 120, and a variable light domain comprising a vlCDR1 comprising the amino acid sequence of SEQ ID NO: 122, a vlCDR2 comprising the amino acid sequence of SEQ ID NO: 123, and a vlCDR3 comprising the amino acid sequence of SEQ ID NO: 124. In some such antibodies, the VH1 and VL1 comprise a variable heavy domain comprising a vhCDR1 comprising the amino acid sequence of SEQ ID NO: 126, a vhCDR2 comprising the amino acid sequence of SEQ ID NO: 127, and a vhCDR3 comprising the amino acid sequence of SEQ ID NO: 128, and a variable light domain comprising a vlCDR1 comprising the amino acid sequence of SEQ ID NO: 130, a vlCDR2 comprising the amino acid sequence of SEQ ID NO: 131, and a vlCDR3 comprising the amino acid sequence of the amino acid sequence of SEQ ID NO: 132. In some such antibodies, the VH1 and VL1 comprise a variable heavy domain comprising a vhCDR1 comprising the amino acid sequence of SEQ ID NO: 134, a vhCDR2 comprising the amino acid sequence of SEQ ID NO: 135, and a vhCDR3 comprising the amino acid sequence of SEQ ID NO: 136, and a variable light domain comprising a vlCDR1 comprising the amino acid sequence of SEQ ID NO: 138, a vlCDR2 comprising the amino acid sequence of SEQ ID NO: 139, and a vlCDR3 comprising the amino acid sequence of the amino acid sequence of SEQ ID NO: 140. In some such antibodies, the VH1 and VL1 comprise a variable heavy domain comprising a vhCDR1 comprising the amino acid sequence of SEQ ID NO: 142, a vhCDR2 comprising the amino acid sequence of SEQ ID NO: 143, and a vhCDR3 comprising the amino acid sequence of SEQ ID NO: 144, and a variable light domain comprising a vlCDR1 comprising the amino acid sequence of SEQ ID NO: 146, a vlCDR2 comprising the amino acid sequence of SEQ ID NO: 147, and a vlCDR3 comprising the amino acid sequence of SEQ ID NO: 148. In some such antibodies, the VH1 and VL1 comprise a variable heavy domain comprising a vhCDR1 comprising the amino acid sequence of SEQ ID NO: 150, a vhCDR2 comprising the amino acid sequence of SEQ ID NO: 151, and a vhCDR3 comprising the amino acid sequence of SEQ ID NO: 152, and a variable light domain comprising a vlCDR1 comprising the amino acid sequence of SEQ ID NO: 154, a vlCDR2 comprising the amino acid sequence of SEQ ID NO: 155, and a vlCDR3 comprising the amino acid sequence of SEQ ID NO: 156. In some such antibodies, the VH1 and VL1 comprise a variable heavy domain comprising a vhCDR1 comprising the amino acid sequence of SEQ ID NO: 118, a vhCDR2 comprising the amino acid sequence of SEQ ID NO: 158, and a vhCDR3 comprising the amino acid sequence of SEQ ID NO: 120, and a variable light domain comprising a vlCDR1 comprising the amino acid sequence of SEQ ID NO: 122, a vlCDR2 comprising the amino acid sequence of SEQ ID NO: 123, and a vlCDR3 comprising the amino acid sequence of SEQ ID NO: 160. In some such antibodies, the VH1 and VL1 comprise a variable heavy domain comprising a vhCDR1 comprising the amino acid sequence of SEQ ID NO: 162, a vhCDR2 comprising the amino acid sequence of SEQ ID NO: 163, and a vhCDR3 comprising the amino acid sequence of SEQ ID NO: 164, and a variable light domain comprising a vlCDR1 comprising the amino acid sequence of SEQ ID NO: 166, a vlCDR2 comprising the amino acid sequence of SEQ ID NO: 167, and a vlCDR3 comprising the amino acid sequence of SEQ ID NO: 168. In some such antibodies, the VH1 and VL1 comprise a variable heavy domain comprising a vhCDR1 comprising the amino acid sequence of SEQ ID NO: 170, a vhCDR2 comprising the amino acid sequence of SEQ ID NO: 171, and a vhCDR3 comprising the amino acid sequence of SEQ ID NO: 172, and a variable light domain comprising a vlCDR1 comprising the amino acid sequence of SEQ ID NO: 174, a vlCDR2 comprising the amino acid sequence of SEQ ID NO: 175, and a vlCDR3 comprising the amino acid sequence of SEQ ID NO: 176.

[0058] In some such antibodies, the VH1 is at least 90%, at least 95%, at least 96%, at least 97%, at least 98%, or at least 99% identical to the amino acid sequence of any one of SEQ ID NOS: 2241, 2253, 2259, 1674, and 1200, and the VL1 is at least 90%, at least 95%, at least 96%, at least 97%, at least 98%, or at least 99% identical to the amino acid sequence of any one of SEQ ID NOS: 2243 and 1204. In some such antibodies, the VH1 is at least 90%, at least 95%, at least 96%, at least 97%, at least 98%, or at least 99% identical to the amino acid sequence of SEQ ID NO: 2241, and the VL1 is at least 90%, at least 95%, at least 96%, at least 97%, at least 98%, or at least 99% identical to the amino acid sequence of SEQ ID NO: 2243. In some such antibodies, the VH1 is at least 90%, at least 95%, at least 96%, at least 97%, at least 98%, or at least 99% identical to the amino acid sequence of SEQ ID NO: 2253, and the VL1 is at least 90%, at least 95%, at least 96%, at least 97%, at least 98%, or at least 99% identical to the amino acid sequence of SEQ ID NO: 2243. In some such antibodies, the VH1 is at least 90%, at least 95%, at least 96%, at least 97%, at least 98%, or at least 99% identical to the amino acid sequence of SEQ ID NO: 2259, and the VL1 is at least 90%, at least 95%, at least 96%, at least 97%, at least 98%, or at least 99% identical to the amino acid sequence of SEQ ID NO: 2243. In some such antibodies, the VH1 is at least 90%, at least 95%, at least 96%, at least 97%, at least 98%, or at least 99% identical to the amino acid sequence of SEQ ID NO: 1674, and the VL1 is at least 90%, at least 95%, at least 96%, at least 97%, at least 98%, or at least 99% identical to the amino acid sequence of SEQ ID NO: 1204. In some such antibodies, the VH1 is at least 90%, at least 95%, at least 96%, at least 97%, at least 98%, or at least 99% identical to the amino acid sequence of SEQ ID NO: 1200, and the VL1 is at least 90%, at least 95%, at least 96%, at least 97%, at least 98%, or at least 99% identical to the amino acid sequence of SEQ ID NO: 1204. In some such antibodies, the VH1 is at least 90%, at least 95%, at least 96%, at least 97%, at least 98%, or at least 99% identical to the amino acid sequence of any one of SEQ ID NOS: 1427-1823 and 2316-2330, and the VL1 is at least 90%, at least 95%, at least 96%, at least 97%, at least 98%, or at least 99% identical to the amino acid sequence of any one of SEQ ID NOS: 1824-1923. In some such antibodies, the VH1 is at least 90%, at least 95%, at least 96%, at least 97%, at least 98%, or at least 99% identical to the amino acid sequence of any one of SEQ ID NOS: 1674, 1200, 1661, and 2323, and the VL1 is at least 90%, at least 95%, at least 96%, at least 97%, at least 98%, or at least 99% identical to the amino acid sequence of SEQ ID NO: 1204. In some such antibodies, the VH1 is at least 90%, at least 95%, at least 96%, at least 97%, at least 98%, or at least 99% identical to the amino acid sequence of SEQ ID NO: 1661, and the VL1 is at least 90%, at least 95%, at least 96%, at least 97%, at least 98%, or at least 99% identical to the amino acid sequence of SEQ ID NO: 1204. In some such antibodies, the VH1 is at least 90%, at least 95%, at least 96%, at least 97%, at least 98%, or at least 99% identical to the amino acid sequence of SEQ ID NO: 2323, and the VL1 is at least 90%, at least 95%, at least 96%, at least 97%, at least 98%, or at least 99% identical to the amino acid sequence of SEQ ID NO: 1204. In some such antibodies, the VH1 is at least 90%, at least 95%, at least 96%, at least 97%, at least 98%, or at least 99% identical to the amino acid sequence of SEQ ID NO: 101, and the VL1 is at least 90%, at least 95%, at least 96%, at least 97%, at least 98%, or at least 99% identical to the amino acid sequence of SEQ ID NO: 105. In some such antibodies, the VH1 is at least 90%, at least 95%, at least 96%, at least 97%, at least 98%, or at least 99% identical to the amino acid sequence of SEQ ID NO: 109, and the VL1 is at least 90%, at least 95%, at least 96%, at least 97%, at least 98%, or at least 99% identical to the amino acid sequence of SEQ ID NO: 113. In some such antibodies, the VH1 is at least 90%, at least 95%, at least 96%, at least 97%, at least 98%, or at least 99% identical to the amino acid sequence of SEQ ID NO: 117, and the VL1 is at least 90%, at least 95%, at least 96%, at least 97%, at least 98%, or at least 99% identical to the amino acid sequence of SEQ ID NO: 121. In some such antibodies, the VH1 is at least 90%, at least 95%, at least 96%, at least 97%, at least 98%, or at least 99% identical to the amino acid sequence of SEQ ID NO: 125, and the VL1 is at least 90%, at least 95%, at least 96%, at least 97%, at least 98%, or at least 99% identical to the amino acid sequence of SEQ ID NO: 129. In some such antibodies, the VH1 is at least 90%, at least 95%, at least 96%, at least 97%, at least 98%, or at least 99% identical to the amino acid sequence SEQ ID NO: 133, and the VL1 is at least 90%, at least 95%, at least 96%, at least 97%, at least 98%, or at least 99% identical to the amino acid sequence of SEQ ID NO: 137. In some such antibodies, the VH1 is at least 90%, at least 95%, at least 96%, at least 97%, at least 98%, or at least 99% identical to the amino acid sequence of SEQ ID NO: 141, and the VL1 is at least 90%, at least 95%, at least 96%, at least 97%, at least 98%, or at least 99% identical to the amino acid sequence of SEQ ID NO: 145. In some such antibodies, the VH1 is at least 90%, at least 95%, at least 96%, at least 97%, at least 98%, or at least 99% identical to the amino acid sequence of SEQ ID NO: 149, and the VL1 is at least 90%, at least 95%, at least 96%, at least 97%, at least 98%, or at least 99% identical to the amino acid sequence of SEQ ID NO: 153. In some such antibodies, the VH1 is at least 90%, at least 95%, at least 96%, at least 97%, at least 98%, or at least 99% identical to the amino acid sequence of SEQ ID NO: 157, and the VL1 is at least 90%, at least 95%, at least 96%, at least 97%, at least 98%, or at least 99% identical to the amino acid sequence of SEQ ID NO: 159. In some such antibodies, the VH1 is at least 90%, at least 95%, at least 96%, at least 97%, at least 98%, or at least 99% identical to the amino acid sequence of SEQ ID NO: 161, and the VL1 is at least 90%, at least 95%, at least 96%, at least 97%, at least 98%, or at least 99% identical to the amino acid sequence of SEQ ID NO: 165. In some such antibodies, the VH1 is at least 90%, at least 95%, at least 96%, at least 97%, at least 98%, or at least 99% identical to the amino acid sequence of SEQ ID NO: 169, and the VL1 is at least 90%, at least 95%, at least 96%, at least 97%, at least 98%, or at least 99% identical to the amino acid sequence of SEQ ID NO: 173. In some such antibodies, the VH1 and the VL1 are at least 90%, at least 95%, at least 96%, at least 97%, at least 98%, or at least 99% identical to any pair of anti-TL1A variable heavy domain and variable light domain in XENP53412, XENP53413, XENP53369, XENP53375, XENP53387, XENP53415, XENP53370, XENP53371, XENP53376, XENP53377, XENP53378, XENP53379, XENP53380, or XENP53414. In some such antibodies, the VH1 and the VL1 are at least 90%, at least 95%, at least 96%, at least 97%, at least 98%, or at least 99% identical to any pair of anti-TL1A variable heavy domain and variable light domain in Tables 26 and 29-34.

[0059] In some such antibodies, the VH1 comprises the amino acid sequence of any one of SEQ ID NOS: 2241, 2253, 2259, 1674, and 1200, and the VL1 comprises the amino acid sequence of any one of SEQ ID NOS: 2243 and 1204. In some such antibodies, the VH1 comprises the amino acid sequence of SEQ ID NO: 2241, and the VL1 comprises the amino acid sequence of SEQ ID NO: 2243. In some such antibodies, the VH1 comprises the amino acid sequence of SEQ ID NO: 2253, and the VL1 comprises the amino acid sequence of SEQ ID NO: 2243. In some such antibodies, the VH1 comprises the amino acid sequence of SEQ ID NO: 2259, and the VL1 comprises the amino acid sequence of SEQ ID NO: 2243. In some such antibodies, the VH1 comprises the amino acid sequence of SEQ ID NO: 1674, and the VL1 comprises the amino acid sequence of SEQ ID NO: 1204. In some such antibodies, the VH1 comprises the amino acid sequence of SEQ ID NO: 1200, and the VL1 comprises the amino acid sequence of SEQ ID NO: 1204. In some such antibodies, the VH1 comprises the amino acid sequence of any one of SEQ ID NOS: 1427-1823 and 2316-2330, and the VL1 comprises the amino acid sequence of any one of SEQ ID NOS: 1824-1923. In some such antibodies, the VH1 comprises the amino acid sequence of any one of SEQ ID NOS: 1674, 1200, 1661, and 2323, and the VL1 comprises the amino acid sequence of SEQ ID NO: 1204. In some such antibodies, the VH1 comprises the amino acid sequence of SEQ ID NO: 1661, and the VL1 comprises the amino acid sequence of SEQ ID NO: 1204. In some such antibodies, the VH1 comprises the amino acid sequence of SEQ ID NO: 2323, and the VL1 comprises the amino acid sequence of SEQ ID NO: 1204. In some such antibodies, the VH1 comprises the amino acid sequence of SEQ ID NO: 101, and the VL1 comprises the amino acid sequence of SEQ ID NO: 105. In some such antibodies, the VH1 comprises the amino acid sequence of SEQ ID NO: 109, and the VL1 comprises the amino acid sequence of SEQ ID NO: 113. In some such antibodies, the VH1 comprises the amino acid sequence of SEQ ID NO: 117, and the VL1 comprises the amino acid sequence of SEQ ID NO: 121. In some such antibodies, the VH1 comprises the amino acid sequence of SEQ ID NO: 125, and the VL1 comprises the amino acid sequence of SEQ ID NO: 129. In some such antibodies, the VH1 comprises the amino acid sequence of SEQ ID NO: 133, and the VL1 comprises the amino acid sequence of SEQ ID NO: 137. In some such antibodies, the VH1 comprises the amino acid sequence of SEQ ID NO: 141, and the VL1 comprises the amino acid sequence of SEQ ID NO: 145. In some such antibodies, the VH1 comprises the amino acid sequence of SEQ ID NO: 149, and the VL1 comprises the amino acid sequence of SEQ ID NO: 153. In some such antibodies, the VH1 comprises the amino acid sequence of SEQ ID NO: 157, and the VL1 comprises the amino acid sequence of SEQ ID NO: 159. In some such antibodies, the VH1 comprises the amino acid sequence of SEQ ID NO: 161, and the VL1 comprises the amino acid sequence of SEQ ID NO: 165. In some such antibodies, the VH1 comprises the amino acid sequence of SEQ ID NO: 169, and the VL1 comprises the amino acid sequence of SEQ ID NO: 173. In some such antibodies, the VH1 and the VL1 comprise any pair of anti-TL1A variable heavy domain and variable light domain in XENP53412, XENP53413, XENP53369, XENP53375, XENP53387, XENP53415, XENP53370, XENP53371, XENP53376, XENP53377, XENP53378, XENP53379, XENP53380, or XENP53414. In some such antibodies, the VH1 and the VL1 comprise any pair of anti-TL1A variable heavy domain and variable light domain in Tables 26 and 29-34. In some such antibodies, the VH1 or VL1 can comprise variants of any above the above in which an N-terminal glutamine or glutamate is replaced with pyroglutamate.

[0060] In some such antibodies, the VH2 and VL2 comprise a variable heavy domain comprising a vhCDR1, a vhCDR2, and a vhCDR3 contained within a variable heavy domain comprising the amino acid sequence of any one of SEQ ID NOS: 2233, 2235, and 179, and a variable light domain comprising a vlCDR1, a vlCDR2, and a vlCDR3 contained within a variable light domain comprising the amino acid sequence of any one of SEQ ID NOS: 2234, 2237, and 1248. In some such antibodies, the VH2 and VL2 comprise a variable heavy domain comprising a vhCDR1, a vhCDR2, and a vhCDR3 contained within a variable heavy domain comprising the amino acid sequence of SEQ ID NO: 2233, and a variable light domain comprising a vlCDR1, a vlCDR2, and a vlCDR3 contained within a variable light domain comprising the amino acid sequence of SEQ ID NO: 2234. In some such antibodies, the VH2 and VL2 comprise a variable heavy domain comprising a vhCDR1, a vhCDR2, and a vhCDR3 contained within a variable heavy domain comprising the amino acid sequence of SEQ ID NO: 2235, and a variable light domain comprising a vlCDR1, a vlCDR2, and a vlCDR3 contained within a variable light domain comprising the amino acid sequence of SEQ ID NO: 2237. In some such antibodies, the VH2 and VL2 comprise a variable heavy domain comprising a vhCDR1, a vhCDR2, and a vhCDR3 contained within a variable heavy domain comprising the amino acid sequence of SEQ ID NO: 179, and a variable light domain comprising a vlCDR1, a vlCDR2, and a vlCDR3 contained within a variable light domain comprising the amino acid sequence of SEQ ID NO: 1248. In some such antibodies, the VH2 and VL2 comprise a variable heavy domain comprising a vhCDR1, a vhCDR2, and a vhCDR3 contained within a variable heavy domain comprising the amino acid sequence of SEQ ID NO: 2113, and a variable light domain comprising a vlCDR1, a vlCDR2, and a vlCDR3 contained within a variable light domain comprising the amino acid sequence of SEQ ID NO: 2231. In some such antibodies, the VH2 and VL2 comprise a variable heavy domain comprising a vhCDR1, a vhCDR2, and a vhCDR3 contained within a variable heavy domain comprising the amino acid sequence of SEQ ID NO: 1967, and a variable light domain comprising a vlCDR1, a vlCDR2, and a vlCDR3 contained within a variable light domain comprising the amino acid sequence of SEQ ID NO: 1248. In some such antibodies, the VH2 and VL2 comprise a variable heavy domain comprising a vhCDR1, a vhCDR2, and a vhCDR3 contained within a variable heavy domain comprising the amino acid sequence of any one of SEQ ID NOS: 1927-2132, and a variable light domain comprising a vlCDR1, a vlCDR2, and a vlCDR3 contained within a variable light domain comprising the amino acid sequence of any one of SEQ ID NOS: 2133-2232. In some such antibodies, the VH2 and VL2 comprise a variable heavy domain comprising a vhCDR1, a vhCDR2, and a vhCDR3 contained within a variable heavy domain comprising the amino acid sequence of SEQ ID NO: 179, and a variable light domain comprising a vlCDR1, a vlCDR2, and a vlCDR3 contained within a variable light domain comprising the amino acid sequence of SEQ ID NO: 183. In some such antibodies, the VH2 and VL2 comprise a variable heavy domain comprising a vhCDR1, a vhCDR2, and a vhCDR3 and a variable light domain comprising a vlCDR1, a vlCDR2, and a vlCDR3 contained within any pair of anti-IL23 variable heavy domain and variable light domain in XENP53412, XENP53413, XENP53369, XENP53375, XENP53387, XENP53415, XENP53370, XENP53371, XENP53376, XENP53377, XENP53378, XENP53379, XENP53380, or XENP53414. In some such antibodies, the VH2 and VL2 comprise a variable heavy domain comprising a vhCDR1, a vhCDR2, and a vhCDR3 and a variable light domain comprising a vlCDR1, a vlCDR2, and a vlCDR3 contained within any pair of anti-IL23 variable heavy domain and variable light domain in Tables 26 and 29-34. In some such antibodies, optionally the CDRs are as defined by the Kabat, Chothia, Kabat+Chothia, AbM, contact, or IMGT definition.

[0061] In some such antibodies, the VH2 and VL2 comprise a variable heavy domain comprising a vhCDR1 comprising the amino acid sequence of SEQ ID NO: 180, a vhCDR2 comprising the amino acid sequence of SEQ ID NO: 181, and a vhCDR3 comprising the amino acid sequence of SEQ ID NO: 182 or 2236, and a variable light domain comprising a vlCDR1 comprising the amino acid sequence of SEQ ID NO: 184, a vlCDR2 comprising the amino acid sequence of SEQ ID NO: 1249 or 2238, and a vlCDR3 comprising the amino acid sequence of SEQ ID NO: 1250. In some such antibodies, the VH2 and VL2 comprise a variable heavy domain comprising a vhCDR1 comprising the amino acid sequence of SEQ ID NO: 180, a vhCDR2 comprising the amino acid sequence of SEQ ID NO: 181, and a vhCDR3 comprising the amino acid sequence of SEQ ID NO: 182, and a variable light domain comprising a vlCDR1 comprising the amino acid sequence of SEQ ID NO: 184, a vlCDR2 comprising the amino acid sequence of SEQ ID NO: 1249, and a vlCDR3 comprising the amino acid sequence of SEQ ID NO: 1250. In some such antibodies, the VH2 and VL2 comprise a variable heavy domain comprising a vhCDR1 comprising the amino acid sequence of SEQ ID NO: 180, a vhCDR2 comprising the amino acid sequence of SEQ ID NO: 181, and a vhCDR3 comprising the amino acid sequence of SEQ ID NO: 2236, and a variable light domain comprising a vlCDR1 comprising the amino acid sequence of SEQ ID NO: 184, a vlCDR2 comprising the amino acid sequence of SEQ ID NO: 2238, and a vlCDR3 comprising the amino acid sequence of SEQ ID NO: 1250. In some such antibodies, the VH2 and VL2 comprise a variable heavy domain comprising a vhCDR1 comprising the amino acid sequence of SEQ ID NO: 2239, a vhCDR2 comprising the amino acid sequence of SEQ ID NO: 181, and a vhCDR3 comprising the amino acid sequence of SEQ ID NO: 182, and a variable light domain comprising a vlCDR1 comprising the amino acid sequence of SEQ ID NO: 184, a vlCDR2 comprising the amino acid sequence of SEQ ID NO: 1249, and a vlCDR3 comprising the amino acid sequence of SEQ ID NO: 1250. In some such antibodies, the VH2 and VL2 comprise a variable heavy domain comprising a vhCDR1 comprising the amino acid sequence of SEQ ID NO: 180, a vhCDR2 comprising the amino acid sequence of SEQ ID NO: 181, and a vhCDR3 comprising the amino acid sequence of SEQ ID NO: 182, and a variable light domain comprising a vlCDR1 comprising the amino acid sequence of SEQ ID NO: 184, a vlCDR2 comprising the amino acid sequence of SEQ ID NO: 115, and a vlCDR3 comprising the amino acid sequence of SEQ ID NO: 185.

[0062] In some such antibodies, the VH2 is at least 90%, at least 95%, at least 96%, at least 97%, at least 98%, or at least 99% identical to the amino acid sequence of any one of SEQ ID NOS: 2233, 2235, and 179, and the VL2 is at least 90%, at least 95%, at least 96%, at least 97%, at least 98%, or at least 99% identical to the amino acid sequence of any one of SEQ ID NOS: 2234, 2237, and 1248. In some such antibodies, the VH2 is at least 90%, at least 95%, at least 96%, at least 97%, at least 98%, or at least 99% identical to the amino acid sequence of SEQ ID NO: 2233, and the VL2 is at least 90%, at least 95%, at least 96%, at least 97%, at least 98%, or at least 99% identical to the amino acid sequence of SEQ ID NO: 2234. In some such antibodies, the VH2 is at least 90%, at least 95%, at least 96%, at least 97%, at least 98%, or at least 99% identical to the amino acid sequence of SEQ ID NO: 2235, and the VL2 is at least 90%, at least 95%, at least 96%, at least 97%, at least 98%, or at least 99% identical to the amino acid sequence of SEQ ID NO: 2237. In some such antibodies, the VH2 is at least 90%, at least 95%, at least 96%, at least 97%, at least 98%, or at least 99% identical to the amino acid sequence of SEQ ID NO: 179, and the VL2 is at least 90%, at least 95%, at least 96%, at least 97%, at least 98%, or at least 99% identical to the amino acid sequence of SEQ ID NO: 1248. In some such antibodies, the VH2 is at least 90%, at least 95%, at least 96%, at least 97%, at least 98%, or at least 99% identical to the amino acid sequence of SEQ ID NO: 2113, and the VL2 is at least 90%, at least 95%, at least 96%, at least 97%, at least 98%, or at least 99% identical to the amino acid sequence of SEQ ID NO: 2231. In some such antibodies, the VH2 is at least 90%, at least 95%, at least 96%, at least 97%, at least 98%, or at least 99% identical to the amino acid sequence of SEQ ID NO: 1967, and the VL2 is at least 90%, at least 95%, at least 96%, at least 97%, at least 98%, or at least 99% identical to the amino acid sequence of SEQ ID NO: 1248. In some such antibodies, the VH2 is at least 90%, at least 95%, at least 96%, at least 97%, at least 98%, or at least 99% identical to the amino acid sequence of any one of SEQ ID NOS: 1927-2132, and the VL2 is at least 90%, at least 95%, at least 96%, at least 97%, at least 98%, or at least 99% identical to the amino acid sequence of any one of SEQ ID NOS: 2133-2232. In some such antibodies, the VH2 is at least 90%, at least 95%, at least 96%, at least 97%, at least 98%, or at least 99% identical to the amino acid sequence of SEQ ID NO: 179, the VL2 is at least 90%, at least 95%, at least 96%, at least 97%, at least 98%, or at least 99% identical to the amino acid sequence of SEQ ID NO: 183. In some such antibodies, the VH2 and the VL2 are at least 90%, at least 95%, at least 96%, at least 97%, at least 98%, or at least 99% identical to any pair of anti-IL23 variable heavy domain and variable light domain in XENP53412, XENP53413, XENP53369, XENP53375, XENP53387, XENP53415, XENP53370, XENP53371, XENP53376, XENP53377, XENP53378, XENP53379, XENP53380, or XENP53414. In some such antibodies, the VH2 and the VL2 are at least 90%, at least 95%, at least 96%, at least 97%, at least 98%, or at least 99% identical to any pair of anti-IL23 variable heavy domain and variable light domain in Tables 26 and 29-34.

[0063] In some such antibodies, the VH2 comprises the amino acid sequence of any one of SEQ ID NOS: 2233, 2235, and 179, and the VL2 comprises the amino acid sequence of any one of SEQ ID NOS: 2234, 2237, and 1248. In some such antibodies, the VH2 comprises the amino acid sequence of SEQ ID NO: 2233, and the VL2 comprises the amino acid sequence of SEQ ID NO: 2234. In some such antibodies, the VH2 comprises the amino acid sequence of SEQ ID NO: 2235, and the VL2 comprises the amino acid sequence of SEQ ID NO: 2237. In some such antibodies, the VH2 comprises the amino acid sequence of SEQ ID NO: 179, and the VL2 comprises the amino acid sequence of SEQ ID NO: 1248. In some such antibodies, the VH2 comprises the amino acid sequence of SEQ ID NO: 2113, and the VL2 comprises the amino acid sequence of SEQ ID NO: 2231. In some such antibodies, the VH2 comprises the amino acid sequence of SEQ ID NO: 1967, and the VL2 comprises the amino acid sequence of SEQ ID NO: 1248. In some such antibodies, the VH2 comprises the amino acid sequence of any one of SEQ ID NOS: 1927-2132, and the VL2 comprises the amino acid sequence of any one of SEQ ID NOS: 2133-2232. In some such antibodies, the VH2 comprises the amino acid sequence of SEQ ID NO: 179, and the VL2 comprises the amino acid sequence of SEQ ID NO: 183. In some such antibodies, the VH2 and the VL2 comprise any pair of anti-IL23 variable heavy domain and variable light domain in XENP53412, XENP53413, XENP53369, XENP53375, XENP53387, XENP53415, XENP53370, XENP53371, XENP53376, XENP53377, XENP53378, XENP53379, XENP53380, or XENP53414. In some such antibodies, the VH2 and the VL2 comprise any pair of anti-IL23 variable heavy domain and variable light domain in Tables 26 and 29-34. In some such antibodies, the VH2 or VL2 can comprise variants of any of the above in which an N-terminal glutamine or glutamate is replaced with pyroglutamate.

[0064] In some such antibodies, the VH1 comprises a vhCDR1, a vhCDR2, and a vhCDR3 contained within a variable heavy domain comprising the amino acid sequence of any one of SEQ ID NOS: 2241, 2253, 2259, 1674, and 1200, (ii) the VL1 comprises a vlCDR1, a vlCDR2, and a vlCDR3 contained within a variable light domain comprising the amino acid sequence of any one of SEQ ID NOS: 2243 and 1204, (iii) the VH2 comprises a vhCDR1, a vhCDR2, and a vhCDR3 contained within a variable heavy domain comprising the amino acid sequence of any one of SEQ ID NOS: 2233, 2235, and 179, and (iv) the VL2 comprises a vlCDR1, a vlCDR2, and a vlCDR3 contained within a variable light domain comprising the amino acid sequence of any one of SEQ ID NOS: 2234, 2237, and 1248, optionally wherein the CDRs are as defined by the Kabat, Chothia, Kabat+Chothia, AbM, contact, or IMGT definition. In some such antibodies, the VH1 comprises a vhCDR1 comprising the amino acid sequence of SEQ ID NO: 102 or 1201, a vhCDR2 comprising the amino acid sequence of SEQ ID NO: 1924 or 1202, and a vhCDR3 comprising the amino acid sequence of SEQ ID NO: 1203 or 104, (ii) the VL1 comprises a vlCDR1 comprising the amino acid sequence of SEQ ID NO: 106, a vlCDR2 comprising the amino acid sequence of SEQ ID NO: 107, and a vlCDR3 comprising the amino acid sequence of SEQ ID NO: 108, (iii) the VH2 comprises a vhCDR1 comprising the amino acid sequence of SEQ ID NO: 180, a vhCDR2 comprising the amino acid sequence of SEQ ID NO: 181, and a vhCDR3 comprising the amino acid sequence of SEQ ID NO: 182 or 2236, and (iv) the VL2 comprises a vlCDR1 comprising the amino acid sequence of SEQ ID NO: 184, a vlCDR2 comprising the amino acid sequence of SEQ ID NO: 1249 or 2238, and a vlCDR3 comprising the amino acid sequence of SEQ ID NO: 1250. In some such antibodies, the VH1 comprises the amino acid sequence of any one of SEQ ID NOS: 2241, 2253, 2259, 1674, and 1200, (ii) the VL1 comprises the amino acid sequence of any one of SEQ ID NOS: 2243 and 1204, (iii) the VH2 comprises the amino acid sequence of any one of SEQ ID NOS: 2233, 2235, and 179, and (iv) the VL2 comprises the amino acid sequence of any one of SEQ ID NOS: 2234, 2237, and 1248, or variants thereof in which an N-terminal glutamine or glutamate is replaced with pyroglutamate. In some such antibodies, the bispecific antibody specifically binds human TL1A with a K_{D} of less than about 6.5E-11 M, less than about 6.4 E-11 M, or less than about 6.3E-11 as measured by surface plasmon resonance or Biacore at 25° C., optionally wherein the bispecific antibody specifically binds human TL1A with a K_{D} of less than about 3E-11 M, less than about 2.9E-11 M, less than about 2.8E-11 M, or less than about 2.7E-11 M. In some such antibodies, the bispecific antibody inhibits TL1A activity in a TL1A luciferase reporter assay with an IC₅₀ of less than about 4.5 nM. In some such antibodies, the bispecific antibody specifically binds human IL23 with a K_{D} of less than about 1.1E-10 M as measured by surface plasmon resonance or Biacore at 25° C., optionally wherein the bispecific antibody specifically binds human IL23 with a K_{D} of less than about 6E-11 M, less than about 5.9E-11 M, less than about 5.8E-11 M, or less than about 5.7E-11 M. In some such antibodies, the bispecific antibody inhibits IL23 activity in an IL23 luciferase reporter assay with an IC₅₀ of less than about 65 pM, less than about 64 pM, or less than about 63 pM, optionally wherein the bispecific antibody inhibits TL23 activity with an IC₅₀ of less than about 60 pM, less than about 59 pM, less than about 58 pM, less than about 57 pM, or less than about 56 pM.

[0065] In some such antibodies, the VH1 comprises a vhCDR1, a vhCDR2, and a vhCDR3 contained within a variable heavy domain comprising the amino acid sequence of any one of SEQ ID NOS: 2241, 2253, and 2259, (ii) the VL1 comprises a vlCDR1, a vlCDR2, and a vlCDR3 contained within a variable light domain comprising the amino acid sequence of SEQ ID NO: 2243, (iii) the VH2 comprises a vhCDR1, a vhCDR2, and a vhCDR3 contained within a variable heavy domain comprising the amino acid sequence of SEQ ID NO: 2233 or 2235, and (iv) the VL2 comprises a vlCDR1, a vlCDR2, and a vlCDR3 contained within a variable light domain comprising the amino acid sequence of SEQ ID NO: 2234 or 2237, optionally wherein the CDRs are as defined by the Kabat, Chothia, Kabat+Chothia, AbM, contact, or IMGT definition. In some such antibodies, the VH1 comprises a vhCDR1 comprising the amino acid sequence of SEQ ID NO: 102 or 1201, a vhCDR2 comprising the amino acid sequence of SEQ ID NO: 1924 or 1202, and a vhCDR3 comprising the amino acid sequence of SEQ ID NO: 1203 or 104, (ii) the VL1 comprises a vlCDR1 comprising the amino acid sequence of SEQ ID NO: 106, a vlCDR2 comprising the amino acid sequence of SEQ ID NO: 107, and a vlCDR3 comprising the amino acid sequence of SEQ ID NO: 108, (iii) the VH2 comprises a vhCDR1 comprising the amino acid sequence of SEQ ID NO: 180, a vhCDR2 comprising the amino acid sequence of SEQ ID NO: 181, and a vhCDR3 comprising the amino acid sequence of SEQ ID NO: 182 or 2236, and (iv) the VL2 comprises a vlCDR1 comprising the amino acid sequence of SEQ ID NO: 184, a vlCDR2 comprising the amino acid sequence of SEQ ID NO: 1249 or 2238, and a vlCDR3 comprising the amino acid sequence of SEQ ID NO: 1250. In some such antibodies, the VH1 comprises the amino acid sequence of any one of SEQ ID NOS: 2241, 2253, and 2259, (ii) the VL1 comprises the amino acid sequence of SEQ ID NO: 2243, (iii) the VH2 comprises the amino acid sequence of SEQ ID NO: 2233 or 2235, and (iv) the VL2 comprises the amino acid sequence of SEQ ID NO: 2234 or 2237, or variants thereof in which an N-terminal glutamine or glutamate is replaced with pyroglutamate. In some such antibodies, the bispecific antibody specifically binds human TL1A with a K_{D} of less than about 6.5E-11 M, less than about 6.4 E-11 M, or less than about 6.3E-11 as measured by surface plasmon resonance or Biacore at 25° C., optionally wherein the bispecific antibody specifically binds human TL1A with a K_{D} of less than about 3E-11 M, less than about 2.9E-11 M, less than about 2.8E-11 M, or less than about 2.7E-11 M. In some such antibodies, the bispecific antibody inhibits TL1A activity in a TL1A luciferase reporter assay with an IC₅₀ of less than about 4.5 nM. In some such antibodies, the bispecific antibody specifically binds human TL23 with a K_{D} of less than about 1.1E-10 M as measured by surface plasmon resonance or Biacore at 25° C., optionally wherein the bispecific antibody specifically binds human IL23 with a K_{D} of less than about 6E-11 M, less than about 5.9E-11 M, less than about 5.8E-11 M, or less than about 5.7E-11 M. In some such antibodies, the bispecific antibody inhibits IL23 activity in an TL23 luciferase reporter assay with an IC₅₀ of less than about 65 pM, less than about 64 pM, or less than about 63 pM, optionally wherein the bispecific antibody inhibits IL23 activity with an IC₅₀ of less than about 60 pM, less than about 59 pM, less than about 58 pM, less than about 57 pM, or less than about 56 pM.

[0066] In some such antibodies, the VH1 comprises a vhCDR1, a vhCDR2, and a vhCDR3 contained within a variable heavy domain comprising the amino acid sequence of SEQ ID NO: 2241, (ii) the VL1 comprises a vlCDR1, a vlCDR2, and a vlCDR3 contained within a variable light domain comprising the amino acid sequence of SEQ ID NO: 2243, (iii) the VH2 comprises a vhCDR1, a vhCDR2, and a vhCDR3 contained within a variable heavy domain comprising the amino acid sequence of SEQ ID NO: 2233, and (iv) the VL2 comprises a vlCDR1, a vlCDR2, and a vlCDR3 contained within a variable light domain comprising the amino acid sequence of SEQ ID NO: 2234, optionally wherein the CDRs are as defined by the Kabat, Chothia, Kabat+Chothia, AbM, contact, or IMGT definition. In some such antibodies, the VH1 comprises a vhCDR1 comprising the amino acid sequence of SEQ ID NO: 102, a vhCDR2 comprising the amino acid sequence of SEQ ID NO: 1924, and a vhCDR3 comprising the amino acid sequence of SEQ ID NO: 1203, (ii) the VL1 comprises a vlCDR1 comprising the amino acid sequence of SEQ ID NO: 106, a vlCDR2 comprising the amino acid sequence of SEQ ID NO: 107, and a vlCDR3 comprising the amino acid sequence of SEQ ID NO: 108, (iii) the VH2 comprises a vhCDR1 comprising the amino acid sequence of SEQ ID NO: 180, a vhCDR2 comprising the amino acid sequence of SEQ ID NO: 181, and a vhCDR3 comprising the amino acid sequence of SEQ ID NO: 182, and (iv) the VL2 comprises a vlCDR1 comprising the amino acid sequence of SEQ ID NO: 184, a vlCDR2 comprising the amino acid sequence of SEQ ID NO: 1249, and a vlCDR3 comprising the amino acid sequence of SEQ ID NO: 1250. In some such antibodies, the VH1 comprises the amino acid sequence of SEQ ID NO: 2241, (ii) the VL1 comprises the amino acid sequence of SEQ ID NO: 2243, (iii) the VH2 comprises the amino acid sequence of SEQ ID NO: 2233, and (iv) the VL2 comprises the amino acid sequence of SEQ ID NO: 2234, or variants thereof in which an N-terminal glutamine or glutamate is replaced with pyroglutamate. In some such antibodies, the bispecific antibody specifically binds human TL1A with a K_{D} of less than about 6.5E-11 M, less than about 6.4 E-11 M, or less than about 6.3E-11 as measured by surface plasmon resonance or Biacore at 25° C., optionally wherein the bispecific antibody specifically binds human TL1A with a K_{D} of less than about 3E-11 M, less than about 2.9E-11 M, less than about 2.8E-11 M, or less than about 2.7E-11 M. In some such antibodies, the bispecific antibody inhibits TL1A activity in a TL1A luciferase reporter assay with an IC₅₀ of less than about 4.5 nM. In some such antibodies, the bispecific antibody specifically binds human IL23 with a K_{D} of less than about 1.1E-10 M as measured by surface plasmon resonance or Biacore at 25° C., optionally wherein the bispecific antibody specifically binds human IL23 with a K_{D} of less than about 6E-11 M, less than about 5.9E-11 M, less than about 5.8E-11 M, or less than about 5.7E-11 M. In some such antibodies, the bispecific antibody inhibits IL23 activity in an IL23 luciferase reporter assay with an IC₅₀ of less than about 65 pM, less than about 64 pM, or less than about 63 pM, optionally wherein the bispecific antibody inhibits IL23 activity with an IC₅₀ of less than about 60 pM, less than about 59 pM, less than about 58 pM, less than about 57 pM, or less than about 56 pM.

[0067] In some such antibodies, the VH1 comprises a vhCDR1, a vhCDR2, and a vhCDR3 contained within a variable heavy domain comprising the amino acid sequence of SEQ ID NO: 2241, (ii) the VL1 comprises a vlCDR1, a vlCDR2, and a vlCDR3 contained within a variable light domain comprising the amino acid sequence of SEQ ID NO: 2243, (iii) the VH2 comprises a vhCDR1, a vhCDR2, and a vhCDR3 contained within a variable heavy domain comprising the amino acid sequence of SEQ ID NO: 2235, and (iv) the VL2 comprises a vlCDR1, a vlCDR2, and a vlCDR3 contained within a variable light domain comprising the amino acid sequence of SEQ ID NO: 2237, optionally wherein the CDRs are as defined by the Kabat, Chothia, Kabat+Chothia, AbM, contact, or IMGT definition. In some such antibodies, the VH1 comprises a vhCDR1 comprising the amino acid sequence of SEQ ID NO: 102, a vhCDR2 comprising the amino acid sequence of SEQ ID NO: 1924, and a vhCDR3 comprising the amino acid sequence of SEQ ID NO: 1203, (ii) the VL1 comprises a vlCDR1 comprising the amino acid sequence of SEQ ID NO: 106, a vlCDR2 comprising the amino acid sequence of SEQ ID NO: 107, and a vlCDR3 comprising the amino acid sequence of SEQ ID NO: 108, (iii) the VH2 comprises a vhCDR1 comprising the amino acid sequence of SEQ ID NO: 180, a vhCDR2 comprising the amino acid sequence of SEQ ID NO: 181, and a vhCDR3 comprising the amino acid sequence of SEQ ID NO: 2236, and (iv) the VL2 comprises a vlCDR1 comprising the amino acid sequence of SEQ ID NO: 184, a vlCDR2 comprising the amino acid sequence of SEQ ID NO: 2238, and a vlCDR3 comprising the amino acid sequence of SEQ ID NO: 1250. In some such antibodies, the VH1 comprises the amino acid sequence of SEQ ID NO: 2241, (ii) the VL1 comprises the amino acid sequence of SEQ ID NO: 2243, (iii) the VH2 comprises the amino acid sequence of SEQ ID NO: 2235, and (iv) the VL2 comprises the amino acid sequence of SEQ ID NO: 2237, or variants thereof in which an N-terminal glutamine or glutamate is replaced with pyroglutamate.

[0068] In some such antibodies, the VH1 comprises a vhCDR1, a vhCDR2, and a vhCDR3 contained within a variable heavy domain comprising the amino acid sequence of SEQ ID NO: 2253, (ii) the VL1 comprises a vlCDR1, a vlCDR2, and a vlCDR3 contained within a variable light domain comprising the amino acid sequence of SEQ ID NO: 2243, (iii) the VH2 comprises a vhCDR1, a vhCDR2, and a vhCDR3 contained within a variable heavy domain comprising the amino acid sequence of SEQ ID NO: 2233, and (iv) the VL2 comprises a vlCDR1, a vlCDR2, and a vlCDR3 contained within a variable light domain comprising the amino acid sequence of SEQ ID NO: 2234, optionally wherein the CDRs are as defined by the Kabat, Chothia, Kabat+Chothia, AbM, contact, or IMGT definition. In some such antibodies, the VH1 comprises a vhCDR1 comprising the amino acid sequence of SEQ ID NO: 1201, a vhCDR2 comprising the amino acid sequence of SEQ ID NO: 1202, and a vhCDR3 comprising the amino acid sequence of SEQ ID NO: 1203, (ii) the VL1 comprises a vlCDR1 comprising the amino acid sequence of SEQ ID NO: 106, a vlCDR2 comprising the amino acid sequence of SEQ ID NO: 107, and a vlCDR3 comprising the amino acid sequence of SEQ ID NO: 108, (iii) the VH2 comprises a vhCDR1 comprising the amino acid sequence of SEQ ID NO: 180, a vhCDR2 comprising the amino acid sequence of SEQ ID NO: 181, and a vhCDR3 comprising the amino acid sequence of SEQ ID NO: 182, and (iv) the VL2 comprises a vlCDR1 comprising the amino acid sequence of SEQ ID NO: 184, a vlCDR2 comprising the amino acid sequence of SEQ ID NO: 1249, and a vlCDR3 comprising the amino acid sequence of SEQ ID NO: 1250. In some such antibodies, the VH1 comprises the amino acid sequence of SEQ ID NO: 2253, (ii) the VL1 comprises the amino acid sequence of SEQ ID NO: 2243, (iii) the VH2 comprises the amino acid sequence of SEQ ID NO: 2233, and (iv) the VL2 comprises the amino acid sequence of SEQ ID NO: 2234, or variants thereof in which an N-terminal glutamine or glutamate is replaced with pyroglutamate.

[0069] In some such antibodies, the VH1 comprises a vhCDR1, a vhCDR2, and a vhCDR3 contained within a variable heavy domain comprising the amino acid sequence of SEQ ID NO: 2259, (ii) the VL1 comprises a vlCDR1, a vlCDR2, and a vlCDR3 contained within a variable light domain comprising the amino acid sequence of SEQ ID NO: 2243, (iii) the VH2 comprises a vhCDR1, a vhCDR2, and a vhCDR3 contained within a variable heavy domain comprising the amino acid sequence of SEQ ID NO: 2233, and (iv) the VL2 comprises a vlCDR1, a vlCDR2, and a vlCDR3 contained within a variable light domain comprising the amino acid sequence of SEQ ID NO: 2234, optionally wherein the CDRs are as defined by the Kabat, Chothia, Kabat+Chothia, AbM, contact, or IMGT definition. In some such antibodies, the VH1 comprises a vhCDR1 comprising the amino acid sequence of SEQ ID NO: 102, a vhCDR2 comprising the amino acid sequence of SEQ ID NO: 1924, and a vhCDR3 comprising the amino acid sequence of SEQ ID NO: 104, (ii) the VL1 comprises a vlCDR1 comprising the amino acid sequence of SEQ ID NO: 106, a vlCDR2 comprising the amino acid sequence of SEQ ID NO: 107, and a vlCDR3 comprising the amino acid sequence of SEQ ID NO: 108, (iii) the VH2 comprises a vhCDR1 comprising the amino acid sequence of SEQ ID NO: 180, a vhCDR2 comprising the amino acid sequence of SEQ ID NO: 181, and a vhCDR3 comprising the amino acid sequence of SEQ ID NO: 182, and (iv) the VL2 comprises a vlCDR1 comprising the amino acid sequence of SEQ ID NO: 184, a vlCDR2 comprising the amino acid sequence of SEQ ID NO: 1249, and a vlCDR3 comprising the amino acid sequence of SEQ ID NO: 1250. In some such antibodies, the VH1 comprises the amino acid sequence of SEQ ID NO: 2259, (ii) the VL1 comprises the amino acid sequence of SEQ ID NO: 2243, (iii) the VH2 comprises the amino acid sequence of SEQ ID NO: 2233, and (iv) the VL2 comprises the amino acid sequence of SEQ ID NO: 2234, or variants thereof in which an N-terminal glutamine or glutamate is replaced with pyroglutamate.

[0070] In some such antibodies, the VH1 comprises a vhCDR1, a vhCDR2, and a vhCDR3 contained within a variable heavy domain comprising the amino acid sequence of SEQ ID NO: 1674, (ii) the VL1 comprises a vlCDR1, a vlCDR2, and a vlCDR3 contained within a variable light domain comprising the amino acid sequence of SEQ ID NO: 1204, (iii) the VH2 comprises a vhCDR1, a vhCDR2, and a vhCDR3 contained within a variable heavy domain comprising the amino acid sequence of SEQ ID NO: 179, and (iv) the VL2 comprises a vlCDR1, a vlCDR2, and a vlCDR3 contained within a variable light domain comprising the amino acid sequence of SEQ ID NO: 1248, optionally wherein the CDRs are as defined by the Kabat, Chothia, Kabat+Chothia, AbM, contact, or IMGT definition. In some such antibodies, the VH1 comprises a vhCDR1 comprising the amino acid sequence of SEQ ID NO: 102, a vhCDR2 comprising the amino acid sequence of SEQ ID NO: 1924, and a vhCDR3 comprising the amino acid sequence of SEQ ID NO: 1203, (ii) the VL1 comprises a vlCDR1 comprising the amino acid sequence of SEQ ID NO: 106, a vlCDR2 comprising the amino acid sequence of SEQ ID NO: 107, and a vlCDR3 comprising the amino acid sequence of SEQ ID NO: 108, (iii) the VH2 comprises a vhCDR1 comprising the amino acid sequence of SEQ ID NO: 180, a vhCDR2 comprising the amino acid sequence of SEQ ID NO: 181, and a vhCDR3 comprising the amino acid sequence of SEQ ID NO: 182, and (iv) the VL2 comprises a vlCDR1 comprising the amino acid sequence of SEQ ID NO: 184, a vlCDR2 comprising the amino acid sequence of SEQ ID NO: 1249, and a vlCDR3 comprising the amino acid sequence of SEQ ID NO: 1250. In some such antibodies, the VH1 comprises the amino acid sequence of SEQ ID NO: 1674, (ii) the VL1 comprises the amino acid sequence of SEQ ID NO: 1204, (iii) the VH2 comprises the amino acid sequence of SEQ ID NO: 179, and (iv) the VL2 comprises the amino acid sequence of SEQ ID NO: 1248, or variants thereof in which an N-terminal glutamine or glutamate is replaced with pyroglutamate.

[0071] In some such antibodies, the VH1 comprises a vhCDR1, a vhCDR2, and a vhCDR3 contained within a variable heavy domain comprising the amino acid sequence of SEQ ID NO: 1200, (ii) the VL1 comprises a vlCDR1, a vlCDR2, and a vlCDR3 contained within a variable light domain comprising the amino acid sequence of SEQ ID NO: 1204, (iii) the VH2 comprises a vhCDR1, a vhCDR2, and a vhCDR3 contained within a variable heavy domain comprising the amino acid sequence of SEQ ID NO: 179, and (iv) the VL2 comprises a vlCDR1, a vlCDR2, and a vlCDR3 contained within a variable light domain comprising the amino acid sequence of SEQ ID NO: 1248, optionally wherein the CDRs are as defined by the Kabat, Chothia, Kabat+Chothia, AbM, contact, or IMGT definition. In some such antibodies, the VH1 comprises a vhCDR1 comprising the amino acid sequence of SEQ ID NO: 1201, a vhCDR2 comprising the amino acid sequence of SEQ ID NO: 1202, and a vhCDR3 comprising the amino acid sequence of SEQ ID NO: 1203, (ii) the VL1 comprises a vlCDR1 comprising the amino acid sequence of SEQ ID NO: 106, a vlCDR2 comprising the amino acid sequence of SEQ ID NO: 107, and a vlCDR3 comprising the amino acid sequence of SEQ ID NO: 108, (iii) the VH2 comprises a vhCDR1 comprising the amino acid sequence of SEQ ID NO: 180, a vhCDR2 comprising the amino acid sequence of SEQ ID NO: 181, and a vhCDR3 comprising the amino acid sequence of SEQ ID NO: 182, and (iv) the VL2 comprises a vlCDR1 comprising the amino acid sequence of SEQ ID NO: 184, a vlCDR2 comprising the amino acid sequence of SEQ ID NO: 1249, and a vlCDR3 comprising the amino acid sequence of SEQ ID NO: 1250. In some such antibodies, the VH1 comprises the amino acid sequence SEQ ID NO: 1200, (ii) the VL1 comprises the amino acid sequence of SEQ ID NO: 1204, (iii) the VH2 comprises the amino acid sequence of SEQ ID NO: 179, and (iv) the VL2 comprises the amino acid sequence of SEQ ID NO: 1248, or variants thereof in which an N-terminal glutamine or glutamate is replaced with pyroglutamate.

[0072] In some such antibodies, the first Fc domain and the second Fc domain comprise a set of heterodimerization skew variants. In some such antibodies, the first Fc domain and the second Fc domain each comprise one or more ablation variants. In some such antibodies, the first monomer or the second monomer comprises one or more pI variants. In some such antibodies, the first heavy chain constant domain comprises amino acid substitutions E233P/L234V/L235A/G236del/S267K and/or the second heavy chain constant domain comprises amino acid substitutions E233P/L234V/L235A/G236del/S267K, wherein numbering is according to EU numbering. In some such antibodies, the first heavy chain constant domain comprises amino acid substitutions M428L/N434S and/or the second heavy chain constant domain comprises amino acid substitutions M428L/N434S, wherein numbering is according to EU numbering. In some such antibodies, the first heavy chain constant domain comprises amino acid substitutions E233P/L234V/L235A/G236del/S267K and M428L/N434S and/or the second heavy chain constant domain comprises amino acid substitutions E233P/L234V/L235A/G236del/S267K and M428L/N434S, wherein numbering is according to EU numbering. In some such antibodies, the first heavy chain constant domain or the second heavy chain constant domain comprises amino acid substitutions L368D/K370S, wherein numbering is according to EU numbering. In some such antibodies, the first heavy chain constant domain or the second heavy chain constant domain comprises amino acid substitutions N208D/Q295E/N384D/Q418E/N421D, wherein numbering is according to EU numbering. In some such antibodies, the first heavy chain constant domain or the second heavy chain constant domain comprises amino acid substitutions E233P/L234V/L235A/G236del/S267K, M428L/N434S, L368D/K370S, and N208D/Q295E/N384D/Q418E/N421D, wherein numbering is according to EU numbering. In some such antibodies, the first heavy chain constant domain or the second heavy chain constant domain comprises amino acid substitutions E357Q/S364K, wherein numbering is according to EU numbering. In some such antibodies, the first heavy chain constant domain comprises amino acid substitutions L368D/K370S, and the second heavy chain constant domain comprises amino acid substitutions E357Q/S364K, wherein numbering is according to EU numbering. In some such antibodies, the first heavy chain constant domain or the second heavy chain constant domain comprises amino acid substitutions E233P/L234V/L235A/G236del/S267K, M428L/N434S, and E357Q/S364K, wherein numbering is according to EU numbering. In some such antibodies, the first heavy chain constant domain comprises amino acid substitutions E233P/L234V/L235A/G236del/S267K, M428L/N434S, L368D/K370S, and N208D/Q295E/N384D/Q418E/N421D, wherein numbering is according to EU numbering, and the second heavy chain constant domain comprises amino acid substitutions E233P/L234V/L235A/G236del/S267K, M428L/N434S, and E357Q/S364K, wherein numbering is according to EU numbering.

[0073] In some such antibodies, the first heavy chain constant domain is of isotype IgG1, and the second heavy chain constant domain is of isotype IgG1. In some such antibodies, the bispecific antibody is a chimeric or humanized bispecific antibody.

[0074] In some such antibodies, the first heavy chain comprises the amino acid sequence of SEQ ID NO: 2240 or a variant thereof in which the N-terminal glutamine is replaced with pyroglutamate and/or the C-terminal lysine or the C-terminal lysine and glycine are removed, and the first light chain comprises the amino acid sequence of SEQ ID NO: 2242. In some such antibodies, the first heavy chain comprises the amino acid sequence of SEQ ID NO: 2252 or a variant thereof in which the N-terminal glutamine is replaced with pyroglutamate and/or the C-terminal lysine or the C-terminal lysine and glycine are removed, and the first light chain comprises the amino acid sequence of SEQ ID NO: 2242. In some such antibodies, the first heavy chain comprises the amino acid sequence of SEQ ID NO: 2258 or a variant thereof in which the N-terminal glutamine is replaced with pyroglutamate and/or the C-terminal lysine or the C-terminal lysine and glycine are removed, and the first light chain comprises the amino acid sequence of SEQ ID NO: 2242. In some such antibodies, the first heavy chain is at least 90%, at least 95%, at least 96%, at least 97%, at least 98%, or at least 99% identical to the amino acid sequence of SEQ ID NO: 2240, and the first light chain is at least 90%, at least 95%, at least 96%, at least 97%, at least 98%, or at least 99% identical to the amino acid sequence of SEQ ID NO: 2242. In some such antibodies, the first heavy chain is at least 90%, at least 95%, at least 96%, at least 97%, at least 98%, or at least 99% identical to the amino acid sequence of SEQ ID NO: 2252, and the first light chain is at least 90%, at least 95%, at least 96%, at least 97%, at least 98%, or at least 99% identical to the amino acid sequence of SEQ ID NO: 2242. In some such antibodies, the first heavy chain is at least 90%, at least 95%, at least 96%, at least 97%, at least 98%, or at least 99% identical to the amino acid sequence of SEQ ID NO: 2258, and the first light chain is at least 90%, at least 95%, at least 96%, at least 97%, at least 98%, or at least 99% identical to the amino acid sequence of SEQ ID NO: 2242.

[0075] In some such antibodies, the second heavy chain comprises the amino acid sequence of SEQ ID NO: 2244 or a variant thereof in which the N-terminal glutamine is replaced with pyroglutamate and/or the C-terminal lysine or the C-terminal lysine and glycine are removed, and the second light chain comprises the amino acid sequence of SEQ ID NO: 2245. In some such antibodies, the second heavy chain comprises the amino acid sequence of SEQ ID NO: 2250 or a variant thereof in which the N-terminal glutamine is replaced with pyroglutamate and/or the C-terminal lysine or the C-terminal lysine and glycine are removed, and the second light chain comprises the amino acid sequence of SEQ ID NO: 2251. In some such antibodies, the second heavy chain is at least 90%, at least 95%, at least 96%, at least 97%, at least 98%, or at least 99% identical to the amino acid sequence of SEQ ID NO: 2244, and the second light chain is at least 90%, at least 95%, at least 96%, at least 97%, at least 98%, or at least 99% identical to the amino acid sequence of SEQ ID NO: 2245. In some such antibodies, the second heavy chain is at least 90%, at least 95%, at least 96%, at least 97%, at least 98%, or at least 99% identical to the amino acid sequence of SEQ ID NO: 2250, and the second light chain is at least 90%, at least 95%, at least 96%, at least 97%, at least 98%, or at least 99% identical to the amino acid sequence of SEQ ID NO: 2251.

[0076] In some such antibodies, the first heavy chain comprises the amino acid sequence of SEQ ID NO: 1132 or a variant thereof in which the N-terminal glutamine is replaced with pyroglutamate and/or the C-terminal lysine or the C-terminal lysine and glycine are removed, the first light chain comprises the amino acid sequence of SEQ ID NO: 1134, the second heavy chain comprises the amino acid sequence of SEQ ID NO: 1133 or a variant thereof in which the N-terminal glutamine is replaced with pyroglutamate and/or the C-terminal lysine or the C-terminal lysine and glycine are removed, and the second light chain comprises the amino acid sequence of SEQ ID NO: 1135. In some such antibodies, the first heavy chain comprises the amino acid sequence of SEQ ID NO: 1136 or a variant thereof in which the N-terminal glutamine is replaced with pyroglutamate and/or the C-terminal lysine or the C-terminal lysine and glycine are removed, the first light chain comprises the amino acid sequence of SEQ ID NO: 1138, the second heavy chain comprises the amino acid sequence of SEQ ID NO: 1137 or a variant thereof in which the N-terminal glutamine is replaced with pyroglutamate and/or the C-terminal lysine or the C-terminal lysine and glycine are removed, and the second light chain comprises the amino acid sequence of SEQ ID NO: 1139. In some such antibodies, the first heavy chain comprises the amino acid sequence of SEQ ID NO: 1084 or a variant thereof in which the N-terminal glutamine is replaced with pyroglutamate and/or the C-terminal lysine or the C-terminal lysine and glycine are removed, the first light chain comprises the amino acid sequence of SEQ ID NO: 1086, the second heavy chain comprises the amino acid sequence of SEQ ID NO: 1085 or a variant thereof in which the N-terminal glutamine is replaced with pyroglutamate and/or the C-terminal lysine or the C-terminal lysine and glycine are removed, and the second light chain comprises the amino acid sequence of SEQ ID NO: 1087. In some such antibodies, the first heavy chain comprises the amino acid sequence of SEQ ID NO: 1108 or a variant thereof in which the N-terminal glutamine is replaced with pyroglutamate and/or the C-terminal lysine or the C-terminal lysine and glycine are removed, the first light chain comprises the amino acid sequence of SEQ ID NO: 1110, the second heavy chain comprises the amino acid sequence of SEQ ID NO: 1109 or a variant thereof in which the N-terminal glutamine is replaced with pyroglutamate and/or the C-terminal lysine or the C-terminal lysine and glycine are removed, and the second light chain comprises the amino acid sequence of SEQ ID NO: 1111. In some such antibodies, the first heavy chain comprises the amino acid sequence of SEQ ID NO: 1088 or a variant thereof in which the N-terminal glutamine is replaced with pyroglutamate and/or the C-terminal lysine or the C-terminal lysine and glycine are removed, the first light chain comprises the amino acid sequence of SEQ ID NO: 1090, the second heavy chain comprises the amino acid sequence of SEQ ID NO: 1089 or a variant thereof in which the N-terminal glutamine is replaced with pyroglutamate and/or the C-terminal lysine or the C-terminal lysine and glycine are removed, and the second light chain comprises the amino acid sequence of SEQ ID NO: 1091. In some such antibodies, the first heavy chain comprises the amino acid sequence of SEQ ID NO: 1092 or a variant thereof in which the N-terminal glutamine is replaced with pyroglutamate and/or the C-terminal lysine or the C-terminal lysine and glycine are removed, the first light chain comprises the amino acid sequence of SEQ ID NO: 1094, the second heavy chain comprises the amino acid sequence of SEQ ID NO: 1093 or a variant thereof in which the N-terminal glutamine is replaced with pyroglutamate and/or the C-terminal lysine or the C-terminal lysine and glycine are removed, and the second light chain comprises the amino acid sequence of SEQ ID NO: 1095. In some such antibodies, the first heavy chain comprises the amino acid sequence of SEQ ID NO: 1112 or a variant thereof in which the N-terminal glutamine is replaced with pyroglutamate and/or the C-terminal lysine or the C-terminal lysine and glycine are removed, the first light chain comprises the amino acid sequence of SEQ ID NO: 1114, the second heavy chain comprises the amino acid sequence of SEQ ID NO: 1113 or a variant thereof in which the N-terminal glutamine is replaced with pyroglutamate and/or the C-terminal lysine or the C-terminal lysine and glycine are removed, and the second light chain comprises the amino acid sequence of SEQ ID NO: 1115. In some such antibodies, the first heavy chain comprises the amino acid sequence of SEQ ID NO: 1116 or a variant thereof in which the N-terminal glutamine is replaced with pyroglutamate and/or the C-terminal lysine or the C-terminal lysine and glycine are removed, the first light chain comprises the amino acid sequence of SEQ ID NO: 1118, the second heavy chain comprises the amino acid sequence of SEQ ID NO: 1117 or a variant thereof in which the N-terminal glutamine is replaced with pyroglutamate and/or the C-terminal lysine or the C-terminal lysine and glycine are removed, and the second light chain comprises the amino acid sequence of SEQ ID NO: 1119. In some such antibodies, the first heavy chain comprises the amino acid sequence of SEQ ID NO: 1120 or a variant thereof in which the N-terminal glutamine is replaced with pyroglutamate and/or the C-terminal lysine or the C-terminal lysine and glycine are removed, the first light chain comprises the amino acid sequence of SEQ ID NO: 1122, the second heavy chain comprises the amino acid sequence of SEQ ID NO: 1121 or a variant thereof in which the N-terminal glutamine is replaced with pyroglutamate and/or the C-terminal lysine or the C-terminal lysine and glycine are removed, and the second light chain comprises the amino acid sequence of SEQ ID NO: 1123. In some such antibodies, the first heavy chain comprises the amino acid sequence of SEQ ID NO: 1124 or a variant thereof in which the N-terminal glutamine is replaced with pyroglutamate and/or the C-terminal lysine or the C-terminal lysine and glycine are removed, the first light chain comprises the amino acid sequence of SEQ ID NO: 1126, the second heavy chain comprises the amino acid sequence of SEQ ID NO: 1125 or a variant thereof in which the N-terminal glutamine is replaced with pyroglutamate and/or the C-terminal lysine or the C-terminal lysine and glycine are removed, and the second light chain comprises the amino acid sequence of SEQ ID NO: 1127. In some such antibodies, the first heavy chain comprises the amino acid sequence of SEQ ID NO: 1128 or a variant thereof in which the N-terminal glutamine is replaced with pyroglutamate and/or the C-terminal lysine or the C-terminal lysine and glycine are removed, the first light chain comprises the amino acid sequence of SEQ ID NO: 1130, the second heavy chain comprises the amino acid sequence of SEQ ID NO: 1129 or a variant thereof in which the N-terminal glutamine is replaced with pyroglutamate and/or the C-terminal lysine or the C-terminal lysine and glycine are removed, and the second light chain comprises the amino acid sequence of SEQ ID NO: 1131. In some such antibodies, the first heavy chain comprises the amino acid sequence of SEQ ID NO: 1140, the first light chain comprises the amino acid sequence of SEQ ID NO: 1142, the second heavy chain comprises the amino acid sequence of SEQ ID NO: 1141, and the second light chain comprises the amino acid sequence of SEQ ID NO: 1143. In some such antibodies, the first heavy chain is at least 90%, at least 95%, at least 96%, at least 97%, at least 98%, or at least 99% identical to the amino acid sequence of SEQ ID NO: 1132, the first light chain is at least 90%, at least 95%, at least 96%, at least 97%, at least 98%, or at least 99% identical to the amino acid sequence of SEQ ID NO:1134, the second heavy chain is at least 90%, at least 95%, at least 96%, at least 97%, at least 98%, or at least 99% identical to the amino acid sequence of SEQ ID NO: 1133, and the second light chain is at least 90%, at least 95%, at least 96%, at least 97%, at least 98%, or at least 99% identical to the amino acid sequence of SEQ ID NO: 1135. In some such antibodies, the first heavy chain is at least 90%, at least 95%, at least 96%, at least 97%, at least 98%, or at least 99% identical to the amino acid sequence of SEQ ID NO: 1136, the first light chain is at least 90%, at least 95%, at least 96%, at least 97%, at least 98%, or at least 99% identical to the amino acid sequence of SEQ ID NO: 1138, the second heavy chain is at least 90%, at least 95%, at least 96%, at least 97%, at least 98%, or at least 99% identical to the amino acid sequence of SEQ ID NO: 1137, and the second light chain is at least 90%, at least 95%, at least 96%, at least 97%, at least 98%, or at least 99% identical to the amino acid sequence of SEQ ID NO: 1139. In some such antibodies, the first heavy chain is at least 90%, at least 95%, at least 96%, at least 97%, at least 98%, or at least 99% identical to the amino acid sequence of SEQ ID NO: 1084, the first light chain is at least 90%, at least 95%, at least 96%, at least 97%, at least 98%, or at least 99% identical to the amino acid sequence of SEQ ID NO: 1086, the second heavy chain is at least 90%, at least 95%, at least 96%, at least 97%, at least 98%, or at least 99% identical to the amino acid sequence of SEQ ID NO: 1085, and the second light chain is at least 90%, at least 95%, at least 96%, at least 97%, at least 98%, or at least 99% identical to the amino acid sequence of SEQ ID NO: 1087. In some such antibodies, the first heavy chain is at least 90%, at least 95%, at least 96%, at least 97%, at least 98%, or at least 99% identical to the amino acid sequence of SEQ ID NO: 1108, the first light chain is at least 90%, at least 95%, at least 96%, at least 97%, at least 98%, or at least 99% identical to the amino acid sequence of SEQ ID NO: 1110, the second heavy chain is at least 90%, at least 95%, at least 96%, at least 97%, at least 98%, or at least 99% identical to the amino acid sequence of SEQ ID NO: 1109, and the second light chain is at least 90%, at least 95%, at least 96%, at least 97%, at least 98%, or at least 99% identical to the amino acid sequence of SEQ ID NO: 1111. In some such antibodies, the first heavy chain is at least 90%, at least 95%, at least 96%, at least 97%, at least 98%, or at least 99% identical to the amino acid sequence of SEQ ID NO: 1088, the first light chain is at least 90%, at least 95%, at least 96%, at least 97%, at least 98%, or at least 99% identical to the amino acid sequence of SEQ ID NO: 1090, the second heavy chain is at least 90%, at least 95%, at least 96%, at least 97%, at least 98%, or at least 99% identical to the amino acid sequence of SEQ ID NO: 1089, and the second light chain is at least 90%, at least 95%, at least 96%, at least 97%, at least 98%, or at least 99% identical to the amino acid sequence of SEQ ID NO: 1091. In some such antibodies, the first heavy chain is at least 90%, at least 95%, at least 96%, at least 97%, at least 98%, or at least 99% identical to the amino acid sequence of SEQ ID NO: 1092, the first light chain is at least 90%, at least 95%, at least 96%, at least 97%, at least 98%, or at least 99% identical to the amino acid sequence of SEQ ID NO: 1094, the second heavy chain is at least 90%, at least 95%, at least 96%, at least 97%, at least 98%, or at least 99% identical to the amino acid sequence of SEQ ID NO: 1093, and the second light chain is at least 90%, at least 95%, at least 96%, at least 97%, at least 98%, or at least 99% identical to the amino acid sequence of SEQ ID NO: 1095. In some such antibodies, the first heavy chain is at least 90%, at least 95%, at least 96%, at least 97%, at least 98%, or at least 99% identical to the amino acid sequence of SEQ ID NO: 1112, the first light chain is at least 90%, at least 95%, at least 96%, at least 97%, at least 98%, or at least 99% identical to the amino acid sequence of SEQ ID NO: 1114, the second heavy chain is at least 90%, at least 95%, at least 96%, at least 97%, at least 98%, or at least 99% identical to the amino acid sequence of SEQ ID NO: 1113, and the second light chain is at least 90%, at least 95%, at least 96%, at least 97%, at least 98%, or at least 99% identical to the amino acid sequence of SEQ ID NO: 1115. In some such antibodies, the first heavy chain is at least 90%, at least 95%, at least 96%, at least 97%, at least 98%, or at least 99% identical to the amino acid sequence of SEQ ID NO: 1116, the first light chain is at least 90%, at least 95%, at least 96%, at least 97%, at least 98%, or at least 99% identical to the amino acid sequence of SEQ ID NO: 1118, the second heavy chain is at least 90%, at least 95%, at least 96%, at least 97%, at least 98%, or at least 99% identical to the amino acid sequence of SEQ ID NO: 1117, and the second light chain is at least 90%, at least 95%, at least 96%, at least 97%, at least 98%, or at least 99% identical to the amino acid sequence of SEQ ID NO: 1119. In some such antibodies, the first heavy chain is at least 90%, at least 95%, at least 96%, at least 97%, at least 98%, or at least 99% identical to the amino acid sequence of SEQ ID NO: 1120, the first light chain is at least 90%, at least 95%, at least 96%, at least 97%, at least 98%, or at least 99% identical to the amino acid sequence of SEQ ID NO: 1122, the second heavy chain is at least 90%, at least 95%, at least 96%, at least 97%, at least 98%, or at least 99% identical to the amino acid sequence of SEQ ID NO: 1121, and the second light chain is at least 90%, at least 95%, at least 96%, at least 97%, at least 98%, or at least 99% identical to the amino acid sequence of SEQ ID NO: 1123. In some such antibodies, the first heavy chain is at least 90%, at least 95%, at least 96%, at least 97%, at least 98%, or at least 99% identical to the amino acid sequence of SEQ ID NO: 1124, the first light chain is at least 90%, at least 95%, at least 96%, at least 97%, at least 98%, or at least 99% identical to the amino acid sequence of SEQ ID NO: 1126, the second heavy chain is at least 90%, at least 95%, at least 96%, at least 97%, at least 98%, or at least 99% identical to the amino acid sequence of SEQ ID NO: 1125, and the second light chain is at least 90%, at least 95%, at least 96%, at least 97%, at least 98%, or at least 99% identical to the amino acid sequence of SEQ ID NO: 1127. In some such antibodies, the first heavy chain is at least 90%, at least 95%, at least 96%, at least 97%, at least 98%, or at least 99% identical to the amino acid sequence of SEQ ID NO: 1128, the first light chain is at least 90%, at least 95%, at least 96%, at least 97%, at least 98%, or at least 99% identical to the amino acid sequence of SEQ ID NO: 1130, the second heavy chain is at least 90%, at least 95%, at least 96%, at least 97%, at least 98%, or at least 99% identical to the amino acid sequence of SEQ ID NO: 1129, and the second light chain is at least 90%, at least 95%, at least 96%, at least 97%, at least 98%, or at least 99% identical to the amino acid sequence of SEQ ID NO: 1131. In some such antibodies, the first heavy chain is at least 90%, at least 95%, at least 96%, at least 97%, at least 98%, or at least 99% identical to the amino acid sequence of SEQ ID NO: 1140, the first light chain is at least 90%, at least 95%, at least 96%, at least 97%, at least 98%, or at least 99% identical to the amino acid sequence of SEQ ID NO: 1142, the second heavy chain is at least 90%, at least 95%, at least 96%, at least 97%, at least 98%, or at least 99% identical to the amino acid sequence of SEQ ID NO: 1141, and the second light chain is at least 90%, at least 95%, at least 96%, at least 97%, at least 98%, or at least 99% identical to the amino acid sequence of SEQ ID NO: 1143. In some such antibodies, the first heavy chain, the first light chain, the second heavy chain, and the second light chain comprise any set of four chains from XENP53412, XENP53413, XENP53369, XENP53375, XENP53370, XENP53371, XENP53376, XENP53377, XENP53378, XENP53379, XENP53380, or XENP53414. In some such antibodies, the first heavy chain, the first light chain, the second heavy chain, and the second light chain comprise any set of four chains from Tables 29 and 30.

[0077] In some such antibodies, the first heavy chain comprises the amino acid sequence of SEQ ID NO: 2240 or a variant thereof in which the N-terminal glutamine is replaced with pyroglutamate and/or the C-terminal lysine or the C-terminal lysine and glycine are removed, the first light chain comprises the amino acid sequence of SEQ ID NO: 2242, the second heavy chain comprises the amino acid sequence of SEQ ID NO: 2244 or a variant thereof in which the N-terminal glutamine is replaced with pyroglutamate and/or the C-terminal lysine or the C-terminal lysine and glycine are removed, and the second light chain comprises the amino acid sequence of SEQ ID NO: 2245. In some such antibodies, the first heavy chain comprises the amino acid sequence of SEQ ID NO: 2240 or a variant thereof in which the N-terminal glutamine is replaced with pyroglutamate and/or the C-terminal lysine or the C-terminal lysine and glycine are removed, the first light chain comprises the amino acid sequence of SEQ ID NO: 2242, the second heavy chain comprises the amino acid sequence of SEQ ID NO: 2250 or a variant thereof in which the N-terminal glutamine is replaced with pyroglutamate and/or the C-terminal lysine or the C-terminal lysine and glycine are removed, and the second light chain comprises the amino acid sequence of SEQ ID NO: 2251. In some such antibodies, the first heavy chain comprises the amino acid sequence of SEQ ID NO: 2252 or a variant thereof in which the N-terminal glutamine is replaced with pyroglutamate and/or the C-terminal lysine or the C-terminal lysine and glycine are removed, the first light chain comprises the amino acid sequence of SEQ ID NO: 2242, the second heavy chain comprises the amino acid sequence of SEQ ID NO: 2244 or a variant thereof in which the N-terminal glutamine is replaced with pyroglutamate and/or the C-terminal lysine or the C-terminal lysine and glycine are removed, and the second light chain comprises the amino acid sequence of SEQ ID NO: 2245. In some such antibodies, the first heavy chain comprises the amino acid sequence of SEQ ID NO: 2258 or a variant thereof in which the N-terminal glutamine is replaced with pyroglutamate and/or the C-terminal lysine or the C-terminal lysine and glycine are removed, the first light chain comprises the amino acid sequence of SEQ ID NO: 2242, the second heavy chain comprises the amino acid sequence of SEQ ID NO: 2244 or a variant thereof in which the N-terminal glutamine is replaced with pyroglutamate and/or the C-terminal lysine or the C-terminal lysine and glycine are removed, and the second light chain comprises the amino acid sequence of SEQ ID NO: 2245. In some such antibodies, the first heavy chain is at least 90%, at least 95%, at least 96%, at least 97%, at least 98%, or at least 99% identical to the amino acid sequence of SEQ ID NO: 2240, the first light chain is at least 90%, at least 95%, at least 96%, at least 97%, at least 98%, or at least 99% identical to the amino acid sequence of SEQ ID NO: 2242, the second heavy chain is at least 90%, at least 95%, at least 96%, at least 97%, at least 98%, or at least 99% identical to the amino acid sequence of SEQ ID NO: 2244, and the second light chain is at least 90%, at least 95%, at least 96%, at least 97%, at least 98%, or at least 99% identical to the amino acid sequence of SEQ ID NO: 2245. In some such antibodies, the first heavy chain is at least 90%, at least 95%, at least 96%, at least 97%, at least 98%, or at least 99% identical to the amino acid sequence of SEQ ID NO: 2240, the first light chain is at least 90%, at least 95%, at least 96%, at least 97%, at least 98%, or at least 99% identical to the amino acid sequence of SEQ ID NO: 2242, the second heavy chain is at least 90%, at least 95%, at least 96%, at least 97%, at least 98%, or at least 99% identical to the amino acid sequence of SEQ ID NO: 2250, and the second light chain is at least 90%, at least 95%, at least 96%, at least 97%, at least 98%, or at least 99% identical to the amino acid sequence of SEQ ID NO: 2251. In some such antibodies, the first heavy chain is at least 90%, at least 95%, at least 96%, at least 97%, at least 98%, or at least 99% identical to the amino acid sequence of SEQ ID NO: 2252, the first light chain is at least 90%, at least 95%, at least 96%, at least 97%, at least 98%, or at least 99% identical to the amino acid sequence of SEQ ID NO: 2242, the second heavy chain is at least 90%, at least 95%, at least 96%, at least 97%, at least 98%, or at least 99% identical to the amino acid sequence of SEQ ID NO: 2244, and the second light chain is at least 90%, at least 95%, at least 96%, at least 97%, at least 98%, or at least 99% identical to the amino acid sequence of SEQ ID NO: 2245. In some such antibodies, the first heavy chain is at least 90%, at least 95%, at least 96%, at least 97%, at least 98%, or at least 99% identical to the amino acid sequence of SEQ ID NO: 2258, the first light chain is at least 90%, at least 95%, at least 96%, at least 97%, at least 98%, or at least 99% identical to the amino acid sequence of SEQ ID NO: 2242, the second heavy chain is at least 90%, at least 95%, at least 96%, at least 97%, at least 98%, or at least 99% identical to the amino acid sequence of SEQ ID NO: 2244, and the second light chain is at least 90%, at least 95%, at least 96%, at least 97%, at least 98%, or at least 99% identical to the amino acid sequence of SEQ ID NO: 2245.

[0078] In some such antibodies, the bispecific antibody specifically binds human TL1A with a K_{D} of less than about 6.5E-11 M, less than about 6.4 E-11 M, or less than about 6.3E-11 as measured by surface plasmon resonance or Biacore at 25° C., optionally wherein the bispecific antibody specifically binds human TL1A with a K_{D} of less than about 3E-11 M, less than about 2.9E-11 M, less than about 2.8E-11 M, or less than about 2.7E-11 M. In some such antibodies, the bispecific antibody inhibits TL1A activity in a TL1A luciferase reporter assay with an IC₅₀ of less than about 4.5 nM. In some such antibodies, the bispecific antibody specifically binds human IL23 with a K_{D} of less than about 1.1E-10 M as measured by surface plasmon resonance or Biacore at 25° C., optionally wherein the bispecific antibody specifically binds human IL23 with a K_{D} of less than about 6E-11 M, less than about 5.9E-11 M, less than about 5.8E-11 M, or less than about 5.7E-11 M. In some such antibodies, the bispecific antibody inhibits IL23 activity in an IL23 luciferase reporter assay with an IC₅₀ of less than about 65 pM, less than about 64 pM, or less than about 63 pM, optionally wherein the bispecific antibody inhibits IL23 activity with an IC₅₀ of less than about 60 pM, less than about 59 pM, less than about 58 pM, less than about 57 pM, or less than about 56 pM.

[0079] In another aspect, provided are bispecific or heterodimeric antibodies comprising: (a) a first monomer comprising a first heavy chain comprising a VL1-CH1-hinge-CH2-CH3, wherein VL1 is a first variable light domain, CH1-hinge-CH2-CH3 is a first heavy chain constant domain, and CH2-CH3 is a first Fc domain; (b) a second monomer comprising a second heavy chain comprising a VH2-CH1-hinge-CH2-CH3, wherein VH2 is a second variable heavy domain, CH1-hinge-CH2-CH3 is a second heavy chain constant domain, and CH2-CH3 is a second Fc domain; (c) a first light chain comprising a VH1-CL, wherein VH1 is a first variable heavy domain, and CL is a first light chain constant domain; and (d) a second light chain comprising a VL2-CL, wherein VL2 is a second variable light domain, and CL is a second light chain constant domain, wherein the VH1 and VL1 together form a first antigen-binding domain (ABD), and the VH2 and the VL2 together form a second ABD, wherein the first ABD is a TL1A-binding domain and the second ABD is an IL23-binding domain, or wherein the first ABD is an IL23-binding domain and the second ABD is a TL1A-binding domain. For example, any of the above antibodies can be in this format.

[0080] In some such antibodies, the second heavy chain constant domain and the second light chain constant domain comprise a set of electrostatic steering variants at positions 213 and 218 of the second heavy chain constant domain according to EU numbering and positions 122 and 123 of the second light chain constant domain according to Kabat numbering. In some such antibodies, the second heavy chain constant domain and the second light chain constant domain comprise a set of electrostatic steering variants as depicted in FIG. 4 or Table 27. In some such antibodies, the second heavy chain constant domain comprises amino acid substitutions K213E/K218D according to EU numbering, and the second light chain constant domain comprises amino acid substitutions D122K/E123K according to Kabat numbering.

[0081] In some such antibodies, the first ABD is a TL1A-binding domain and the second ABD is an IL23-binding domain.

[0082] In some such antibodies, the VH1 and VL1 comprise a variable heavy domain comprising a vhCDR1, a vhCDR2, and a vhCDR3 contained within a variable heavy domain comprising the amino acid sequence of any one of SEQ ID NOS: 1674, 1200, 2241, 2253, and 2259, and a variable light domain comprising a vlCDR1, a vlCDR2, and a vlCDR3 contained within a variable light domain comprising the amino acid sequence of any one of SEQ ID NOS: 1204 and 2243. In some such antibodies, the VH1 and VL1 comprise a variable heavy domain comprising a vhCDR1, a vhCDR2, and a vhCDR3 contained within a variable heavy domain comprising the amino acid sequence of SEQ ID NO: 1674, and a variable light domain comprising a vlCDR1, a vlCDR2, and a vlCDR3 contained within a variable light domain comprising the amino acid sequence of SEQ ID NO: 1204. In some such antibodies, the VH1 and VL1 comprise a variable heavy domain comprising a vhCDR1, a vhCDR2, and a vhCDR3 contained within a variable heavy domain comprising the amino acid sequence of SEQ ID NO: 1200, and a variable light domain comprising a vlCDR1, a vlCDR2, and a vlCDR3 contained within a variable light domain comprising the amino acid sequence of SEQ ID NO: 1204. In some such antibodies, the VH1 and VL1 comprise a variable heavy domain comprising a vhCDR1, a vhCDR2, and a vhCDR3 contained within a variable heavy domain comprising the amino acid sequence of SEQ ID NO: 2241, and a variable light domain comprising a vlCDR1, a vlCDR2, and a vlCDR3 contained within a variable light domain comprising the amino acid sequence of SEQ ID NO: 2243. In some such antibodies, the VH1 and VL1 comprise a variable heavy domain comprising a vhCDR1, a vhCDR2, and a vhCDR3 contained within a variable heavy domain comprising the amino acid sequence of SEQ ID NO: 2253, and a variable light domain comprising a vlCDR1, a vlCDR2, and a vlCDR3 contained within a variable light domain comprising the amino acid sequence of SEQ ID NO: 2243. In some such antibodies, the VH1 and VL1 comprise a variable heavy domain comprising a vhCDR1, a vhCDR2, and a vhCDR3 contained within a variable heavy domain comprising the amino acid sequence of SEQ ID NO: 2259, and a variable light domain comprising a vlCDR1, a vlCDR2, and a vlCDR3 contained within a variable light domain comprising the amino acid sequence of SEQ ID NO: 2243. In some such antibodies, the VH1 and VL1 comprise a variable heavy domain comprising a vhCDR1, a vhCDR2, and a vhCDR3 contained within a variable heavy domain comprising the amino acid sequence of any one of SEQ ID NOS: 1427-1823 and 2316-2330, and a variable light domain comprising a vlCDR1, a vlCDR2, and a vlCDR3 contained within a variable light domain comprising the amino acid sequence of any one of SEQ ID NOS: 1824-1923. In some such antibodies, the VH1 and VL1 comprise a variable heavy domain comprising a vhCDR1, a vhCDR2, and a vhCDR3 contained within a variable heavy domain comprising the amino acid sequence of any one of SEQ ID NOS: 1674, 1200, 1661, and 2323, and a variable light domain comprising a vlCDR1, a vlCDR2, and a vlCDR3 contained within a variable light domain comprising the amino acid sequence of SEQ ID NO: 1204. In some such antibodies, the VH1 and VL1 comprise a variable heavy domain comprising a vhCDR1, a vhCDR2, and a vhCDR3 contained within a variable heavy domain comprising the amino acid sequence of SEQ ID NO: 1661, and a variable light domain comprising a vlCDR1, a vlCDR2, and a vlCDR3 contained within a variable light domain comprising the amino acid sequence of SEQ ID NO: 1204. In some such antibodies, the VH1 and VL1 comprise a variable heavy domain comprising a vhCDR1, a vhCDR2, and a vhCDR3 contained within a variable heavy domain comprising the amino acid sequence of SEQ ID NO: 2323, and a variable light domain comprising a vlCDR1, a vlCDR2, and a vlCDR3 contained within a variable light domain comprising the amino acid sequence of SEQ ID NO: 1204. In some such antibodies, the VH1 and VL1 comprise a variable heavy domain comprising a vhCDR1, a vhCDR2, and a vhCDR3 contained within a variable heavy domain comprising the amino acid sequence of SEQ ID NO: 101, and a variable light domain comprising a vlCDR1, a vlCDR2, and a vlCDR3 contained within a variable light domain comprising the amino acid sequence of SEQ ID NO: 105. In some such antibodies, the VH1 and VL1 comprise a variable heavy domain comprising a vhCDR1, a vhCDR2, and a vhCDR3 contained within a variable heavy domain comprising the amino acid sequence of SEQ ID NO: 109, and a variable light domain comprising a vlCDR1, a vlCDR2, and a vlCDR3 contained within a variable light domain comprising the amino acid sequence of SEQ ID NO: 113. In some such antibodies, the VH1 and VL1 comprise a variable heavy domain comprising a vhCDR1, a vhCDR2, and a vhCDR3 contained within a variable heavy domain comprising the amino acid sequence of SEQ ID NO: 117, and a variable light domain comprising a vlCDR1, a vlCDR2, and a vlCDR3 contained within a variable light domain comprising the amino acid sequence of SEQ ID NO: 121. In some such antibodies, the VH1 and VL1 comprise a variable heavy domain comprising a vhCDR1, a vhCDR2, and a vhCDR3 contained within a variable heavy domain comprising the amino acid sequence of SEQ ID NO: 125, and a variable light domain comprising a vlCDR1, a vlCDR2, and a vlCDR3 contained within a variable light domain comprising the amino acid sequence of SEQ ID NO: 129. In some such antibodies, the VH1 and VL1 comprise a variable heavy domain comprising a vhCDR1, a vhCDR2, and a vhCDR3 contained within a variable heavy domain comprising the amino acid sequence of SEQ ID NO: 133, and a variable light domain comprising a vlCDR1, a vlCDR2, and a vlCDR3 contained within a variable light domain comprising the amino acid sequence of SEQ ID NO: 137. In some such antibodies, the VH1 and VL1 comprise a variable heavy domain comprising a vhCDR1, a vhCDR2, and a vhCDR3 contained within a variable heavy domain comprising the amino acid sequence of SEQ ID NO: 141, and a variable light domain comprising a vlCDR1, a vlCDR2, and a vlCDR3 contained within a variable light domain comprising the amino acid sequence of SEQ ID NO: 145. In some such antibodies, the VH1 and VL1 comprise a variable heavy domain comprising a vhCDR1, a vhCDR2, and a vhCDR3 contained within a variable heavy domain comprising the amino acid sequence of SEQ ID NO: 149, and a variable light domain comprising a vlCDR1, a vlCDR2, and a vlCDR3 contained within a variable light domain comprising the amino acid sequence of SEQ ID NO: 153. In some such antibodies, the VH1 and VL1 comprise a variable heavy domain comprising a vhCDR1, a vhCDR2, and a vhCDR3 contained within a variable heavy domain comprising the amino acid sequence of SEQ ID NO: 157, and a variable light domain comprising a vlCDR1, a vlCDR2, and a vlCDR3 contained within a variable light domain comprising the amino acid sequence of SEQ ID NO: 159. In some such antibodies, the VH1 and VL1 comprise a variable heavy domain comprising a vhCDR1, a vhCDR2, and a vhCDR3 contained within a variable heavy domain comprising the amino acid sequence of SEQ ID NO: 161, and a variable light domain comprising a vlCDR1, a vlCDR2, and a vlCDR3 contained within a variable light domain comprising the amino acid sequence of SEQ ID NO: 165. In some such antibodies, the VH1 and VL1 comprise a variable heavy domain comprising a vhCDR1, a vhCDR2, and a vhCDR3 contained within a variable heavy domain comprising the amino acid sequence of SEQ ID NO: 169, and a variable light domain comprising a vlCDR1, a vlCDR2, and a vlCDR3 contained within a variable light domain comprising the amino acid sequence of SEQ ID NO: 173. In some such antibodies, the VH1 and VL1 comprise a variable heavy domain comprising a vhCDR1, a vhCDR2, and a vhCDR3 and a variable light domain comprising a vlCDR1, a vlCDR2, and a vlCDR3 contained within any pair of anti-TL1A variable heavy domain and variable light domain in XENP53412, XENP53413, XENP53369, XENP53375, XENP53387, XENP53415, XENP53370, XENP53371, XENP53376, XENP53377, XENP53378, XENP53379, XENP53380, or XENP53414. In some such antibodies, the VH1 and VL1 comprise a variable heavy domain comprising a vhCDR1, a vhCDR2, and a vhCDR3 and a variable light domain comprising a vlCDR1, a vlCDR2, and a vlCDR3 contained within any pair of anti-TL1A variable heavy domain and variable light domain in Tables 26 and 29-34. Optionally, the CDRs in any of the above antibodies are as defined by the Kabat, Chothia, Kabat+Chothia, AbM, contact, or IMGT definition.

[0083] In some such antibodies, the VH1 and VL1 comprise a variable heavy domain comprising a vhCDR1 comprising the amino acid sequence of SEQ ID NO: 102 or 1201, a vhCDR2 comprising the amino acid sequence of SEQ ID NO: 1924 or 1202, and a vhCDR3 comprising the amino acid sequence of SEQ ID NO: 1203 or 104, and a variable light domain comprising a vlCDR1 comprising the amino acid sequence of SEQ ID NO: 106, a vlCDR2 comprising the amino acid sequence of SEQ ID NO: 107, and a vlCDR3 comprising the amino acid sequence of SEQ ID NO: 108. In some such antibodies, the VH1 and VL1 comprise a variable heavy domain comprising a vhCDR1 comprising the amino acid sequence of SEQ ID NO: 102, a vhCDR2 comprising the amino acid sequence of SEQ ID NO: 1924, and a vhCDR3 comprising the amino acid sequence of SEQ ID NO: 1203, and a variable light domain comprising a vlCDR1 comprising the amino acid sequence of SEQ ID NO: 106, a vlCDR2 comprising the amino acid sequence of SEQ ID NO: 107, and a vlCDR3 comprising the amino acid sequence of SEQ ID NO: 108. In some such antibodies, the VH1 and VL1 comprise a variable heavy domain comprising a vhCDR1 comprising the amino acid sequence of SEQ ID NO: 1201, a vhCDR2 comprising the amino acid sequence of SEQ ID NO: 1202, and a vhCDR3 comprising the amino acid sequence of SEQ ID NO: 1203, and a variable light domain comprising a vlCDR1 comprising the amino acid sequence of SEQ ID NO: 106, a vlCDR2 comprising the amino acid sequence of SEQ ID NO: 107, and a vlCDR3 comprising the amino acid sequence of SEQ ID NO: 108. In some such antibodies, the VH1 and VL1 comprise a variable heavy domain comprising a vhCDR1 comprising the amino acid sequence of SEQ ID NO: 102, a vhCDR2 comprising the amino acid sequence of SEQ ID NO: 1924, and a vhCDR3 comprising the amino acid sequence of SEQ ID NO: 104, and a variable light domain comprising a vlCDR1 comprising the amino acid sequence of SEQ ID NO: 106, a vlCDR2 comprising the amino acid sequence of SEQ ID NO: 107, and a vlCDR3 comprising the amino acid sequence of SEQ ID NO: 108. In some such antibodies, the VH1 and VL1 comprise a variable heavy domain comprising a vhCDR1 comprising the amino acid sequence of SEQ ID NO: 102, a vhCDR2 comprising the amino acid sequence of SEQ ID NO: 1926, and a vhCDR3 comprising the amino acid sequence of SEQ ID NO: 104, and a variable light domain comprising a vlCDR1 comprising the amino acid sequence of SEQ ID NO: 106, a vlCDR2 comprising the amino acid sequence of SEQ ID NO: 107, and a vlCDR3 comprising the amino acid sequence of SEQ ID NO: 108. In some such antibodies, the VH1 and VL1 comprise a variable heavy domain comprising a vhCDR1 comprising the amino acid sequence of SEQ ID NO: 102, a vhCDR2 comprising the amino acid sequence of SEQ ID NO: 103, and a vhCDR3 comprising the amino acid sequence of SEQ ID NO: 104, and a variable light domain comprising a vlCDR1 comprising the amino acid sequence of SEQ ID NO: 106, a vlCDR2 comprising the amino acid sequence of SEQ ID NO: 107, and a vlCDR3 comprising the amino acid sequence of SEQ ID NO: 108. In some such antibodies, the VH1 and VL1 comprise a variable heavy domain comprising a vhCDR1 comprising the amino acid sequence of SEQ ID NO: 110, a vhCDR2 comprising the amino acid sequence of SEQ ID NO: 111, and a vhCDR3 comprising the amino acid sequence of SEQ ID NO: 112, and a variable light domain comprising a vlCDR1 comprising the amino acid sequence of SEQ ID NO: 114, a vlCDR2 comprising the amino acid sequence of SEQ ID NO: 115, and a vlCDR3 comprising the amino acid sequence of SEQ ID NO: 116. In some such antibodies, the VH1 and VL1 comprise a variable heavy domain comprising a vhCDR1 comprising the amino acid sequence of SEQ ID NO: 118, a vhCDR2 comprising the amino acid sequence of SEQ ID NO: 119, and a vhCDR3 comprising the amino acid sequence of SEQ ID NO: 120, and a variable light domain comprising a vlCDR1 comprising the amino acid sequence of SEQ ID NO: 122, a vlCDR2 comprising the amino acid sequence of SEQ ID NO: 123, and a vlCDR3 comprising the amino acid sequence of SEQ ID NO: 124. In some such antibodies, the VH1 and VL1 comprise a variable heavy domain comprising a vhCDR1 comprising the amino acid sequence of SEQ ID NO: 126, a vhCDR2 comprising the amino acid sequence of SEQ ID NO: 127, and a vhCDR3 comprising the amino acid sequence of SEQ ID NO: 128, and a variable light domain comprising a vlCDR1 comprising the amino acid sequence of SEQ ID NO: 130, a vlCDR2 comprising the amino acid sequence of SEQ ID NO: 131, and a vlCDR3 comprising the amino acid sequence of the amino acid sequence of SEQ ID NO: 132. In some such antibodies, the VH1 and VL1 comprise a variable heavy domain comprising a vhCDR1 comprising the amino acid sequence of SEQ ID NO: 134, a vhCDR2 comprising the amino acid sequence of SEQ ID NO: 135, and a vhCDR3 comprising the amino acid sequence of SEQ ID NO: 136, and a variable light domain comprising a vlCDR1 comprising the amino acid sequence of SEQ ID NO: 138, a vlCDR2 comprising the amino acid sequence of SEQ ID NO: 139, and a vlCDR3 comprising the amino acid sequence of the amino acid sequence of SEQ ID NO: 140. In some such antibodies, the VH1 and VL1 comprise a variable heavy domain comprising a vhCDR1 comprising the amino acid sequence of SEQ ID NO: 142, a vhCDR2 comprising the amino acid sequence of SEQ ID NO: 143, and a vhCDR3 comprising the amino acid sequence of SEQ ID NO: 144, and a variable light domain comprising a vlCDR1 comprising the amino acid sequence of SEQ ID NO: 146, a vlCDR2 comprising the amino acid sequence of SEQ ID NO: 147, and a vlCDR3 comprising the amino acid sequence of SEQ ID NO: 148. In some such antibodies, the VH1 and VL1 comprise a variable heavy domain comprising a vhCDR1 comprising the amino acid sequence of SEQ ID NO: 150, a vhCDR2 comprising the amino acid sequence of SEQ ID NO: 151, and a vhCDR3 comprising the amino acid sequence of SEQ ID NO: 152, and a variable light domain comprising a vlCDR1 comprising the amino acid sequence of SEQ ID NO: 154, a vlCDR2 comprising the amino acid sequence of SEQ ID NO: 155, and a vlCDR3 comprising the amino acid sequence of SEQ ID NO: 156. In some such antibodies, the VH1 and VL1 comprise a variable heavy domain comprising a vhCDR1 comprising the amino acid sequence of SEQ ID NO: 118, a vhCDR2 comprising the amino acid sequence of SEQ ID NO: 158, and a vhCDR3 comprising the amino acid sequence of SEQ ID NO: 120, and a variable light domain comprising a vlCDR1 comprising the amino acid sequence of SEQ ID NO: 122, a vlCDR2 comprising the amino acid sequence of SEQ ID NO: 123, and a vlCDR3 comprising the amino acid sequence of SEQ ID NO: 160. In some such antibodies, the VH1 and VL1 comprise a variable heavy domain comprising a vhCDR1 comprising the amino acid sequence of SEQ ID NO: 162, a vhCDR2 comprising the amino acid sequence of SEQ ID NO: 163, and a vhCDR3 comprising the amino acid sequence of SEQ ID NO: 164, and a variable light domain comprising a vlCDR1 comprising the amino acid sequence of SEQ ID NO: 166, a vlCDR2 comprising the amino acid sequence of SEQ ID NO: 167, and a vlCDR3 comprising the amino acid sequence of SEQ ID NO: 168. In some such antibodies, the VH1 and VL1 comprise a variable heavy domain comprising a vhCDR1 comprising the amino acid sequence of SEQ ID NO: 170, a vhCDR2 comprising the amino acid sequence of SEQ ID NO: 171, and a vhCDR3 comprising the amino acid sequence of SEQ ID NO: 172, and a variable light domain comprising a vlCDR1 comprising the amino acid sequence of SEQ ID NO: 174, a vlCDR2 comprising the amino acid sequence of SEQ ID NO: 175, and a vlCDR3 comprising the amino acid sequence of SEQ ID NO: 176.

[0084] In some such antibodies, the VH1 is at least 90%, at least 95%, at least 96%, at least 97%, at least 98%, or at least 99% identical to the amino acid sequence of any one of SEQ ID NOS: 1674, 1200, 2241, 2253, and 2259, and the VL1 is at least 90%, at least 95%, at least 96%, at least 97%, at least 98%, or at least 99% identical to the amino acid sequence of any one of SEQ ID NOS: 1204 and 2243. In some such antibodies, the VH1 is at least 90%, at least 95%, at least 96%, at least 97%, at least 98%, or at least 99% identical to the amino acid sequence of SEQ ID NO: 1674, and the VL1 is at least 90%, at least 95%, at least 96%, at least 97%, at least 98%, or at least 99% identical to the amino acid sequence of SEQ ID NO: 1204. In some such antibodies, the VH1 is at least 90%, at least 95%, at least 96%, at least 97%, at least 98%, or at least 99% identical to the amino acid sequence of SEQ ID NO: 1200, and the VL1 is at least 90%, at least 95%, at least 96%, at least 97%, at least 98%, or at least 99% identical to the amino acid sequence of SEQ ID NO: 1204. In some such antibodies, the VH1 is at least 90%, at least 95%, at least 96%, at least 97%, at least 98%, or at least 99% identical to the amino acid sequence of SEQ ID NO: 2241, and the VL1 is at least 90%, at least 95%, at least 96%, at least 97%, at least 98%, or at least 99% identical to the amino acid sequence of SEQ ID NO: 2243. In some such antibodies, the VH1 is at least 90%, at least 95%, at least 96%, at least 97%, at least 98%, or at least 99% identical to the amino acid sequence of SEQ ID NO: 2253, and the VL1 is at least 90%, at least 95%, at least 96%, at least 97%, at least 98%, or at least 99% identical to the amino acid sequence of SEQ ID NO: 2243. In some such antibodies, the VH1 is at least 90%, at least 95%, at least 96%, at least 97%, at least 98%, or at least 99% identical to the amino acid sequence of SEQ ID NO: 2259, and the VL1 is at least 90%, at least 95%, at least 96%, at least 97%, at least 98%, or at least 99% identical to the amino acid sequence of SEQ ID NO: 2243. In some such antibodies, the VH1 is at least 90%, at least 95%, at least 96%, at least 97%, at least 98%, or at least 99% identical to the amino acid sequence of any one of SEQ ID NOS: 1427-1823 and 2316-2330, and the VL1 is at least 90%, at least 95%, at least 96%, at least 97%, at least 98%, or at least 99% identical to the amino acid sequence of any one of SEQ ID NOS: 1824-1923. In some such antibodies, the VH1 is at least 90%, at least 95%, at least 96%, at least 97%, at least 98%, or at least 99% identical to the amino acid sequence of any one of SEQ ID NOS: 1674, 1200, 1661, and 2323, and the VL1 is at least 90%, at least 95%, at least 96%, at least 97%, at least 98%, or at least 99% identical to the amino acid sequence of SEQ ID NO: 1204. In some such antibodies, the VH1 is at least 90%, at least 95%, at least 96%, at least 97%, at least 98%, or at least 99% identical to the amino acid sequence of SEQ ID NO: 1661, and the VL1 is at least 90%, at least 95%, at least 96%, at least 97%, at least 98%, or at least 99% identical to the amino acid sequence of SEQ ID NO: 1204. In some such antibodies, the VH1 is at least 90%, at least 95%, at least 96%, at least 97%, at least 98%, or at least 99% identical to the amino acid sequence of SEQ ID NO: 2323, and the VL1 is at least 90%, at least 95%, at least 96%, at least 97%, at least 98%, or at least 99% identical to the amino acid sequence of SEQ ID NO: 1204. In some such antibodies, the VH1 is at least 90%, at least 95%, at least 96%, at least 97%, at least 98%, or at least 99% identical to the amino acid sequence of SEQ ID NO: 101, and the VL1 is at least 90%, at least 95%, at least 96%, at least 97%, at least 98%, or at least 99% identical to the amino acid sequence of SEQ ID NO: 105. In some such antibodies, the VH1 is at least 90%, at least 95%, at least 96%, at least 97%, at least 98%, or at least 99% identical to the amino acid sequence of SEQ ID NO: 109, and the VL1 is at least 90%, at least 95%, at least 96%, at least 97%, at least 98%, or at least 99% identical to the amino acid sequence of SEQ ID NO: 113. In some such antibodies, the VH1 is at least 90%, at least 95%, at least 96%, at least 97%, at least 98%, or at least 99% identical to the amino acid sequence of SEQ ID NO: 117, and the VL1 is at least 90%, at least 95%, at least 96%, at least 97%, at least 98%, or at least 99% identical to the amino acid sequence of SEQ ID NO: 121. In some such antibodies, the VH1 is at least 90%, at least 95%, at least 96%, at least 97%, at least 98%, or at least 99% identical to the amino acid sequence of SEQ ID NO: 125, and the VL1 is at least 90%, at least 95%, at least 96%, at least 97%, at least 98%, or at least 99% identical to the amino acid sequence of SEQ ID NO: 129. In some such antibodies, the VH1 is at least 90%, at least 95%, at least 96%, at least 97%, at least 98%, or at least 99% identical to the amino acid sequence SEQ ID NO: 133, and the VL1 is at least 90%, at least 95%, at least 96%, at least 97%, at least 98%, or at least 99% identical to the amino acid sequence of SEQ ID NO: 137. In some such antibodies, the VH1 is at least 90%, at least 95%, at least 96%, at least 97%, at least 98%, or at least 99% identical to the amino acid sequence of SEQ ID NO: 141, and the VL1 is at least 90%, at least 95%, at least 96%, at least 97%, at least 98%, or at least 99% identical to the amino acid sequence of SEQ ID NO: 145. In some such antibodies, the VH1 is at least 90%, at least 95%, at least 96%, at least 97%, at least 98%, or at least 99% identical to the amino acid sequence of SEQ ID NO: 149, and the VL1 is at least 90%, at least 95%, at least 96%, at least 97%, at least 98%, or at least 99% identical to the amino acid sequence of SEQ ID NO: 153. In some such antibodies, the VH1 is at least 90%, at least 95%, at least 96%, at least 97%, at least 98%, or at least 99% identical to the amino acid sequence of SEQ ID NO: 157, and the VL1 is at least 90%, at least 95%, at least 96%, at least 97%, at least 98%, or at least 99% identical to the amino acid sequence of SEQ ID NO: 159. In some such antibodies, the VH1 is at least 90%, at least 95%, at least 96%, at least 97%, at least 98%, or at least 99% identical to the amino acid sequence of SEQ ID NO: 161, and the VL1 is at least 90%, at least 95%, at least 96%, at least 97%, at least 98%, or at least 99% identical to the amino acid sequence of SEQ ID NO: 165. In some such antibodies, the VH1 is at least 90%, at least 95%, at least 96%, at least 97%, at least 98%, or at least 99% identical to the amino acid sequence of SEQ ID NO: 169, and the VL1 is at least 90%, at least 95%, at least 96%, at least 97%, at least 98%, or at least 99% identical to the amino acid sequence of SEQ ID NO: 173. In some such antibodies, the VH1 and the VL1 are at least 90%, at least 95%, at least 96%, at least 97%, at least 98%, or at least 99% identical to any pair of anti-TL1A variable heavy domain and variable light domain in XENP53412, XENP53413, XENP53369, XENP53375, XENP53387, XENP53415, XENP53370, XENP53371, XENP53376, XENP53377, XENP53378, XENP53379, XENP53380, or XENP53414. In some such antibodies, the VH1 and the VL1 are at least 90%, at least 95%, at least 96%, at least 97%, at least 98%, or at least 99% identical to any pair of anti-TL1A variable heavy domain and variable light domain in Tables 26 and 29-34.

[0085] In some such antibodies, the VH1 comprises the amino acid sequence of any one of SEQ ID NOS: 1674, 1200, 2241, 2253, and 2259, and the VL1 comprises the amino acid sequence of any one of SEQ ID NOS: 1204 and 2243. In some such antibodies, the VH1 comprises the amino acid sequence of SEQ ID NO: 1674, and the VL1 comprises the amino acid sequence of SEQ ID NO: 1204. In some such antibodies, the VH1 comprises the amino acid sequence of SEQ ID NO: 1200, and the VL1 comprises the amino acid sequence of SEQ ID NO: 1204. In some such antibodies, the VH1 comprises the amino acid sequence of SEQ ID NO: 2241, and the VL1 comprises the amino acid sequence of SEQ ID NO: 2243. In some such antibodies, the VH1 comprises the amino acid sequence of SEQ ID NO: 2253, and the VL1 comprises the amino acid sequence of SEQ ID NO: 2243. In some such antibodies, the VH1 comprises the amino acid sequence of SEQ ID NO: 2259, and the VL1 comprises the amino acid sequence of SEQ ID NO: 2243. In some such antibodies, the VH1 comprises the amino acid sequence of any one of SEQ ID NOS: 1427-1823 and 2316-2330, and the VL1 comprises the amino acid sequence of any one of SEQ ID NOS: 1824-1923. In some such antibodies, the VH1 comprises the amino acid sequence of any one of SEQ ID NOS: 1674, 1200, 1661, and 2323, and the VL1 comprises the amino acid sequence of SEQ ID NO: 1204. In some such antibodies, the VH1 comprises the amino acid sequence of SEQ ID NO: 1661, and the VL1 comprises the amino acid sequence of SEQ ID NO: 1204. In some such antibodies, the VH1 comprises the amino acid sequence of SEQ ID NO: 2323, and the VL1 comprises the amino acid sequence of SEQ ID NO: 1204. In some such antibodies, the VH1 comprises the amino acid sequence of SEQ ID NO: 101, and the VL1 comprises the amino acid sequence of SEQ ID NO: 105. In some such antibodies, the VH1 comprises the amino acid sequence of SEQ ID NO: 109, and the VL1 comprises the amino acid sequence of SEQ ID NO: 113. In some such antibodies, the VH1 comprises the amino acid sequence of SEQ ID NO: 117, and the VL1 comprises the amino acid sequence of SEQ ID NO: 121. In some such antibodies, the VH1 comprises the amino acid sequence of SEQ ID NO: 125, and the VL1 comprises the amino acid sequence of SEQ ID NO: 129. In some such antibodies, the VH1 comprises the amino acid sequence of SEQ ID NO: 133, and the VL1 comprises the amino acid sequence of SEQ ID NO: 137. In some such antibodies, the VH1 comprises the amino acid sequence of SEQ ID NO: 141, and the VL1 comprises the amino acid sequence of SEQ ID NO: 145. In some such antibodies, the VH1 comprises the amino acid sequence of SEQ ID NO: 149, and the VL1 comprises the amino acid sequence of SEQ ID NO: 153. In some such antibodies, the VH1 comprises the amino acid sequence of SEQ ID NO: 157, and the VL1 comprises the amino acid sequence of SEQ ID NO: 159. In some such antibodies, the VH1 comprises the amino acid sequence of SEQ ID NO: 161, and the VL1 comprises the amino acid sequence of SEQ ID NO: 165. In some such antibodies, the VH1 comprises the amino acid sequence of SEQ ID NO: 169, and the VL1 comprises the amino acid sequence of SEQ ID NO: 173. In some such antibodies, the VH1 and the VL1 comprise any pair of anti-TL1A variable heavy domain and variable light domain in XENP53412, XENP53413, XENP53369, XENP53375, XENP53387, XENP53415, XENP53370, XENP53371, XENP53376, XENP53377, XENP53378, XENP53379, XENP53380, or XENP53414. In some such antibodies, the VH1 and the VL1 comprise any pair of anti-TL1A variable heavy domain and variable light domain in Tables 26 and 29-34. In some such antibodies, the VH1 or VL1 can comprise variants of any of the above in which an N-terminal glutamine or glutamate is replaced with pyroglutamate.

[0086] In some such antibodies, the VH2 and VL2 comprise a variable heavy domain comprising a vhCDR1, a vhCDR2, and a vhCDR3 contained within a variable heavy domain comprising the amino acid sequence of any one of SEQ ID NOS: 179, 2233, and 2235, and a variable light domain comprising a vlCDR1, a vlCDR2, and a vlCDR3 contained within a variable light domain comprising the amino acid sequence of any one of SEQ ID NOS: 1248, 2234, and 2237. In some such antibodies, the VH2 and VL2 comprise a variable heavy domain comprising a vhCDR1, a vhCDR2, and a vhCDR3 contained within a variable heavy domain comprising the amino acid sequence of SEQ ID NO: 179, and a variable light domain comprising a vlCDR1, a vlCDR2, and a vlCDR3 contained within a variable light domain comprising the amino acid sequence of SEQ ID NO: 1248. In some such antibodies, the VH2 and VL2 comprise a variable heavy domain comprising a vhCDR1, a vhCDR2, and a vhCDR3 contained within a variable heavy domain comprising the amino acid sequence of SEQ ID NO: 2233, and a variable light domain comprising a vlCDR1, a vlCDR2, and a vlCDR3 contained within a variable light domain comprising the amino acid sequence of SEQ ID NO: 2234. In some such antibodies, the VH2 and VL2 comprise a variable heavy domain comprising a vhCDR1, a vhCDR2, and a vhCDR3 contained within a variable heavy domain comprising the amino acid sequence of SEQ ID NO: 2235, and a variable light domain comprising a vlCDR1, a vlCDR2, and a vlCDR3 contained within a variable light domain comprising the amino acid sequence of SEQ ID NO: 2237. In some such antibodies, the VH2 and VL2 comprise a variable heavy domain comprising a vhCDR1, a vhCDR2, and a vhCDR3 contained within a variable heavy domain comprising the amino acid sequence of SEQ ID NO: 2113, and a variable light domain comprising a vlCDR1, a vlCDR2, and a vlCDR3 contained within a variable light domain comprising the amino acid sequence of SEQ ID NO: 2231. In some such antibodies, the VH2 and VL2 comprise a variable heavy domain comprising a vhCDR1, a vhCDR2, and a vhCDR3 contained within a variable heavy domain comprising the amino acid sequence of SEQ ID NO: 1967, and a variable light domain comprising a vlCDR1, a vlCDR2, and a vlCDR3 contained within a variable light domain comprising the amino acid sequence of SEQ ID NO: 1248. In some such antibodies, the VH2 and VL2 comprise a variable heavy domain comprising a vhCDR1, a vhCDR2, and a vhCDR3 contained within a variable heavy domain comprising the amino acid sequence of any one of SEQ ID NOS: 1927-2132, and a variable light domain comprising a vlCDR1, a vlCDR2, and a vlCDR3 contained within a variable light domain comprising the amino acid sequence of any one of SEQ ID NOS: 2133-2232. In some such antibodies, the VH2 and VL2 comprise a variable heavy domain comprising a vhCDR1, a vhCDR2, and a vhCDR3 contained within a variable heavy domain comprising the amino acid sequence of SEQ ID NO: 179, and a variable light domain comprising a vlCDR1, a vlCDR2, and a vlCDR3 contained within a variable light domain comprising the amino acid sequence of SEQ ID NO: 183. In some such antibodies, the VH2 and VL2 comprise a variable heavy domain comprising a vhCDR1, a vhCDR2, and a vhCDR3 and a variable light domain comprising a vlCDR1, a vlCDR2, and a vlCDR3 contained within any pair of anti-IL23 variable heavy domain and variable light domain in XENP53412, XENP53413, XENP53369, XENP53375, XENP53387, XENP53415, XENP53370, XENP53371, XENP53376, XENP53377, XENP53378, XENP53379, XENP53380, or XENP53414. In some such antibodies, the VH2 and VL2 comprise a variable heavy domain comprising a vhCDR1, a vhCDR2, and a vhCDR3 and a variable light domain comprising a vlCDR1, a vlCDR2, and a vlCDR3 contained within any pair of anti-IL23 variable heavy domain and variable light domain in Tables 26 and 29-34. Optionally, the CDRs in any of the above antibodies are as defined by the Kabat, Chothia, Kabat+Chothia, AbM, contact, or IMGT definition.

[0087] In some such antibodies, the VH2 and VL2 comprise a variable heavy domain comprising a vhCDR1 comprising the amino acid sequence of SEQ ID NO: 180, a vhCDR2 comprising the amino acid sequence of SEQ ID NO: 181, and a vhCDR3 comprising the amino acid sequence of SEQ ID NO: 182 or 2236, and a variable light domain comprising a vlCDR1 comprising the amino acid sequence of SEQ ID NO: 184, a vlCDR2 comprising the amino acid sequence of SEQ ID NO: 1249 or 2238, and a vlCDR3 comprising the amino acid sequence of SEQ ID NO: 1250. In some such antibodies, the VH2 and VL2 comprise a variable heavy domain comprising a vhCDR1 comprising the amino acid sequence of SEQ ID NO: 180, a vhCDR2 comprising the amino acid sequence of SEQ ID NO: 181, and a vhCDR3 comprising the amino acid sequence of SEQ ID NO: 182, and a variable light domain comprising a vlCDR1 comprising the amino acid sequence of SEQ ID NO: 184, a vlCDR2 comprising the amino acid sequence of SEQ ID NO: 1249, and a vlCDR3 comprising the amino acid sequence of SEQ ID NO: 1250. In some such antibodies, the VH2 and VL2 comprise a variable heavy domain comprising a vhCDR1 comprising the amino acid sequence of SEQ ID NO: 180, a vhCDR2 comprising the amino acid sequence of SEQ ID NO: 181, and a vhCDR3 comprising the amino acid sequence of SEQ ID NO: 2236, and a variable light domain comprising a vlCDR1 comprising the amino acid sequence of SEQ ID NO: 184, a vlCDR2 comprising the amino acid sequence of SEQ ID NO: 2238, and a vlCDR3 comprising the amino acid sequence of SEQ ID NO: 1250. In some such antibodies, the VH2 and VL2 comprise a variable heavy domain comprising a vhCDR1 comprising the amino acid sequence of SEQ ID NO: 2239, a vhCDR2 comprising the amino acid sequence of SEQ ID NO: 181, and a vhCDR3 comprising the amino acid sequence of SEQ ID NO: 182, and a variable light domain comprising a vlCDR1 comprising the amino acid sequence of SEQ ID NO: 184, a vlCDR2 comprising the amino acid sequence of SEQ ID NO: 1249, and a vlCDR3 comprising the amino acid sequence of SEQ ID NO: 1250. In some such antibodies, the VH2 and VL2 comprise a variable heavy domain comprising a vhCDR1 comprising the amino acid sequence of SEQ ID NO: 180, a vhCDR2 comprising the amino acid sequence of SEQ ID NO: 181, and a vhCDR3 comprising the amino acid sequence of SEQ ID NO: 182, and a variable light domain comprising a vlCDR1 comprising the amino acid sequence of SEQ ID NO: 184, a vlCDR2 comprising the amino acid sequence of SEQ ID NO: 115, and a vlCDR3 comprising the amino acid sequence of SEQ ID NO: 185.

[0088] In some such antibodies, the VH2 is at least 90%, at least 95%, at least 96%, at least 97%, at least 98%, or at least 99% identical to the amino acid sequence of any one of SEQ ID NOS: 179, 2233, and 2235, and the VL2 is at least 90%, at least 95%, at least 96%, at least 97%, at least 98%, or at least 99% identical to the amino acid sequence of any one of SEQ ID NOS: 1248, 2234, and 2237. In some such antibodies, the VH2 is at least 90%, at least 95%, at least 96%, at least 97%, at least 98%, or at least 99% identical to the amino acid sequence of SEQ ID NO: 179, and the VL2 is at least 90%, at least 95%, at least 96%, at least 97%, at least 98%, or at least 99% identical to the amino acid sequence of SEQ ID NO: 1248. In some such antibodies, the VH2 is at least 90%, at least 95%, at least 96%, at least 97%, at least 98%, or at least 99% identical to the amino acid sequence of SEQ ID NO: 2233, and the VL2 is at least 90%, at least 95%, at least 96%, at least 97%, at least 98%, or at least 99% identical to the amino acid sequence of SEQ ID NO: 2234. In some such antibodies, the VH2 is at least 90%, at least 95%, at least 96%, at least 97%, at least 98%, or at least 99% identical to the amino acid sequence of SEQ ID NO: 2235, and the VL2 is at least 90%, at least 95%, at least 96%, at least 97%, at least 98%, or at least 99% identical to the amino acid sequence of SEQ ID NO: 2237. In some such antibodies, the VH2 is at least 90%, at least 95%, at least 96%, at least 97%, at least 98%, or at least 99% identical to the amino acid sequence of SEQ ID NO: 2113, and the VL2 is at least 90%, at least 95%, at least 96%, at least 97%, at least 98%, or at least 99% identical to the amino acid sequence of SEQ ID NO: 2231. In some such antibodies, the VH2 is at least 90%, at least 95%, at least 96%, at least 97%, at least 98%, or at least 99% identical to the amino acid sequence of SEQ ID NO: 1967, and the VL2 is at least 90%, at least 95%, at least 96%, at least 97%, at least 98%, or at least 99% identical to the amino acid sequence of SEQ ID NO: 1248. In some such antibodies, the VH2 is at least 90%, at least 95%, at least 96%, at least 97%, at least 98%, or at least 99% identical to the amino acid sequence of any one of SEQ ID NOS: 1927-2132, and the VL2 is at least 90%, at least 95%, at least 96%, at least 97%, at least 98%, or at least 99% identical to the amino acid sequence of any one of SEQ ID NOS: 2133-2232. In some such antibodies, the VH2 is at least 90%, at least 95%, at least 96%, at least 97%, at least 98%, or at least 99% identical to the amino acid sequence of SEQ ID NO: 179, and the VL2 is at least 90%, at least 95%, at least 96%, at least 97%, at least 98%, or at least 99% identical to the amino acid sequence of SEQ ID NO: 183. In some such antibodies, the VH2 and the VL2 are at least 90%, at least 95%, at least 96%, at least 97%, at least 98%, or at least 99% identical to any pair of anti-IL23 variable heavy domain and variable light domain in XENP53412, XENP53413, XENP53369, XENP53375, XENP53387, XENP53415, XENP53370, XENP53371, XENP53376, XENP53377, XENP53378, XENP53379, XENP53380, or XENP53414. In some such antibodies, the VH2 and the VL2 are at least 90%, at least 95%, at least 96%, at least 97%, at least 98%, or at least 99% identical to any pair of anti-IL23 variable heavy domain and variable light domain in Tables 26 and 29-34.

[0089] In some such antibodies, the VH2 comprises the amino acid sequence of any one of SEQ ID NOS: 179, 2233, and 2235, and the VL2 comprises the amino acid sequence of any one of SEQ ID NOS: 1248, 2234, and 2237. In some such antibodies, the VH2 comprises the amino acid sequence of SEQ ID NO: 179, and the VL2 comprises the amino acid sequence of SEQ ID NO: 1248. In some such antibodies, the VH2 comprises the amino acid sequence of SEQ ID NO: 2233, and the VL2 comprises the amino acid sequence of SEQ ID NO: 2234. In some such antibodies, the VH2 comprises the amino acid sequence of SEQ ID NO: 2235, and the VL2 comprises the amino acid sequence of SEQ ID NO: 2237. In some such antibodies, the VH2 comprises the amino acid sequence of SEQ ID NO: 2113, and the VL2 comprises the amino acid sequence of SEQ ID NO: 2231. In some such antibodies, the VH2 comprises the amino acid sequence of SEQ ID NO: 1967, and the VL2 comprises the amino acid sequence of SEQ ID NO: 1248. In some such antibodies, the VH2 comprises the amino acid sequence of any one of SEQ ID NOS: 1927-2132, and the VL2 comprises the amino acid sequence of any one of SEQ ID NOS: 2133-2232. In some such antibodies, the VH2 comprises the amino acid sequence of SEQ ID NO: 179, and the VL2 comprises the amino acid sequence of SEQ ID NO: 183. In some such antibodies, the VH2 and the VL2 comprise any pair of anti-IL23 variable heavy domain and variable light domain in XENP53412, XENP53413, XENP53369, XENP53375, XENP53387, XENP53415, XENP53370, XENP53371, XENP53376, XENP53377, XENP53378, XENP53379, XENP53380, or XENP53414. In some such antibodies, the VH2 and the VL2 comprise any pair of anti-IL23 variable heavy domain and variable light domain in Tables 26 and 29-34. In some such antibodies, the VH2 or VL2 can comprise variants of any of the above in which an N-terminal glutamine or glutamate is replaced with pyroglutamate.

[0090] In some such antibodies, the VH1 comprises a vhCDR1, a vhCDR2, and a vhCDR3 contained within a variable heavy domain comprising the amino acid sequence of any one of SEQ ID NOS: 1674, 1200, 2241, 2253, and 2259, (ii) the VL1 comprises a vlCDR1, a vlCDR2, and a vlCDR3 contained within a variable light domain comprising the amino acid sequence of any one of SEQ ID NOS: 1204 and 2243, (iii) the VH2 comprises a vhCDR1, a vhCDR2, and a vhCDR3 contained within a variable heavy domain comprising the amino acid sequence of any one of SEQ ID NOS: 179, 2233, and 2235, and (iv) the VL2 comprises a vlCDR1, a vlCDR2, and a vlCDR3 contained within a variable light domain comprising the amino acid sequence of any one of SEQ ID NOS: 1248, 2234, and 2237, optionally wherein the CDRs are as defined by the Kabat, Chothia, Kabat+Chothia, AbM, contact, or IMGT definition. In some such antibodies, the VH1 comprises a vhCDR1 comprising the amino acid sequence of SEQ ID NO: 102 or 1201, a vhCDR2 comprising the amino acid sequence of SEQ ID NO: 1924 or 1202, and a vhCDR3 comprising the amino acid sequence of SEQ ID NO: 1203 or 104, (ii) the VL1 comprises a vlCDR1 comprising the amino acid sequence of SEQ ID NO: 106, a vlCDR2 comprising the amino acid sequence of SEQ ID NO: 107, and a vlCDR3 comprising the amino acid sequence of SEQ ID NO: 108, (iii) the VH2 comprises a vhCDR1 comprising the amino acid sequence of SEQ ID NO: 180, a vhCDR2 comprising the amino acid sequence of SEQ ID NO: 181, and a vhCDR3 comprising the amino acid sequence of SEQ ID NO: 182 or 2236, and (iv) the VL2 comprises a vlCDR1 comprising the amino acid sequence of SEQ ID NO: 184, a vlCDR2 comprising the amino acid sequence of SEQ ID NO: 1249 or 2238, and a vlCDR3 comprising the amino acid sequence of SEQ ID NO: 1250. In some such antibodies, the VH1 comprises the amino acid sequence of any one of SEQ ID NOS: 1674, 1200, 2241, 2253, and 2259, (ii) the VL1 comprises the amino acid sequence of any one of SEQ ID NOS: 1204 and 2243, (iii) the VH2 comprises the amino acid sequence of any one of SEQ ID NOS: 179, 2233, and 2235, and (iv) the VL2 comprises the amino acid sequence of any one of SEQ ID NOS: 1248, 2234, and 2237, or variants thereof in which an N-terminal glutamine or glutamate is replaced with pyroglutamate. In some such antibodies, the bispecific antibody specifically binds human TL1A with a K_{D} of less than about 6.5E-11 M, less than about 6.4 E-11 M, or less than about 6.3E-11 as measured by surface plasmon resonance or Biacore at 25° C., optionally wherein the bispecific antibody specifically binds human TL1A with a K_{D} of less than about 3E-11 M, less than about 2.9E-11 M, less than about 2.8E-11 M, or less than about 2.7E-11 M. In some such antibodies, the bispecific antibody inhibits TL1A activity in a TL1A luciferase reporter assay with an IC₅₀ of less than about 4.5 nM. In some such antibodies, the bispecific antibody specifically binds human IL23 with a K_{D} of less than about 1.1E-10 M as measured by surface plasmon resonance or Biacore at 25° C., optionally wherein the bispecific antibody specifically binds human IL23 with a K_{D} of less than about 6E-11 M, less than about 5.9E-11 M, less than about 5.8E-11 M, or less than about 5.7E-11 M. In some such antibodies, the bispecific antibody inhibits IL23 activity in an IL23 luciferase reporter assay with an IC₅₀ of less than about 65 pM, less than about 64 pM, or less than about 63 pM, optionally wherein the bispecific antibody inhibits TL23 activity with an IC₅₀ of less than about 60 pM, less than about 59 pM, less than about 58 pM, less than about 57 pM, or less than about 56 pM.

[0091] In some such antibodies, the VH1 comprises a vhCDR1, a vhCDR2, and a vhCDR3 contained within a variable heavy domain comprising the amino acid sequence of SEQ ID NO: 1674 or 1200, (ii) the VL1 comprises a vlCDR1, a vlCDR2, and a vlCDR3 contained within a variable light domain comprising the amino acid sequence of SEQ ID NO: 1204, (iii) the VH2 comprises a vhCDR1, a vhCDR2, and a vhCDR3 contained within a variable heavy domain comprising the amino acid sequence of SEQ ID NO: 179, and (iv) the VL2 comprises a vlCDR1, a vlCDR2, and a vlCDR3 contained within a variable light domain comprising the amino acid sequence of SEQ ID NO: 1248, optionally wherein the CDRs are as defined by the Kabat, Chothia, Kabat+Chothia, AbM, contact, or IMGT definition. In some such antibodies, the VH1 comprises a vhCDR1 comprising the amino acid sequence of SEQ ID NO: 102 or 1201, a vhCDR2 comprising the amino acid sequence of SEQ ID NO: 1924 or 1202, and a vhCDR3 comprising the amino acid sequence of SEQ ID NO: 1203, (ii) the VL1 comprises a vlCDR1 comprising the amino acid sequence of SEQ ID NO: 106, a vlCDR2 comprising the amino acid sequence of SEQ ID NO: 107, and a vlCDR3 comprising the amino acid sequence of SEQ ID NO: 108, (iii) the VH2 comprises a vhCDR1 comprising the amino acid sequence of SEQ ID NO: 180, a vhCDR2 comprising the amino acid sequence of SEQ ID NO: 181, and a vhCDR3 comprising the amino acid sequence of SEQ ID NO: 182, and (iv) the VL2 comprises a vlCDR1 comprising the amino acid sequence of SEQ ID NO: 184, a vlCDR2 comprising the amino acid sequence of SEQ ID NO: 1249, and a vlCDR3 comprising the amino acid sequence of SEQ ID NO: 1250. In some such antibodies, the VH1 comprises the amino acid sequence of SEQ ID NO: 1674 or 1200, (ii) the VL1 comprises the amino acid sequence of SEQ ID NO: 1204, (iii) the VH2 comprises the amino acid sequence of SEQ ID NO: 179, and (iv) the VL2 comprises the amino acid sequence of SEQ ID NO: 1248, or variants thereof in which an N-terminal glutamine or glutamate is replaced with pyroglutamate. In some such antibodies, the bispecific antibody specifically binds human TL1A with a K_{D} of less than about 6.5E-11 M, less than about 6.4 E-11 M, or less than about 6.3E-11 as measured by surface plasmon resonance or Biacore at 25° C., optionally wherein the bispecific antibody specifically binds human TL1A with a K_{D} of less than about 3E-11 M, less than about 2.9E-11 M, less than about 2.8E-11 M, or less than about 2.7E-11 M. In some such antibodies, the bispecific antibody inhibits TL1A activity in a TL1A luciferase reporter assay with an IC₅₀ of less than about 4.5 nM. In some such antibodies, the bispecific antibody specifically binds human IL23 with a K_{D} of less than about 1.1E-10 M as measured by surface plasmon resonance or Biacore at 25° C., optionally wherein the bispecific antibody specifically binds human IL23 with a K_{D} of less than about 6E-11 M, less than about 5.9E-11 M, less than about 5.8E-11 M, or less than about 5.7E-11 M. In some such antibodies, the bispecific antibody inhibits IL23 activity in an IL23 luciferase reporter assay with an IC₅₀ of less than about 65 pM, less than about 64 pM, or less than about 63 pM, optionally wherein the bispecific antibody inhibits IL23 activity with an IC₅₀ of less than about 60 pM, less than about 59 pM, less than about 58 pM, less than about 57 pM, or less than about 56 pM.

[0092] In some such antibodies, the VH1 comprises a vhCDR1, a vhCDR2, and a vhCDR3 contained within a variable heavy domain comprising the amino acid sequence of SEQ ID NO: 1674, (ii) the VL1 comprises a vlCDR1, a vlCDR2, and a vlCDR3 contained within a variable light domain comprising the amino acid sequence of SEQ ID NO: 1204, (iii) the VH2 comprises a vhCDR1, a vhCDR2, and a vhCDR3 contained within a variable heavy domain comprising the amino acid sequence of SEQ ID NO: 179, and (iv) the VL2 comprises a vlCDR1, a vlCDR2, and a vlCDR3 contained within a variable light domain comprising the amino acid sequence of SEQ ID NO: 1248, optionally wherein the CDRs are as defined by the Kabat, Chothia, Kabat+Chothia, AbM, contact, or IMGT definition. In some such antibodies, the VH1 comprises a vhCDR1 comprising the amino acid sequence of SEQ ID NO: 102, a vhCDR2 comprising the amino acid sequence of SEQ ID NO: 1924, and a vhCDR3 comprising the amino acid sequence of SEQ ID NO: 1203, (ii) the VL1 comprises a vlCDR1 comprising the amino acid sequence of SEQ ID NO: 106, a vlCDR2 comprising the amino acid sequence of SEQ ID NO: 107, and a vlCDR3 comprising the amino acid sequence of SEQ ID NO: 108, (iii) the VH2 comprises a vhCDR1 comprising the amino acid sequence of SEQ ID NO: 180, a vhCDR2 comprising the amino acid sequence of SEQ ID NO: 181, and a vhCDR3 comprising the amino acid sequence of SEQ ID NO: 182, and (iv) the VL2 comprises a vlCDR1 comprising the amino acid sequence of SEQ ID NO: 184, a vlCDR2 comprising the amino acid sequence of SEQ ID NO: 1249, and a vlCDR3 comprising the amino acid sequence of SEQ ID NO: 1250. In some such antibodies, the VH1 comprises the amino acid sequence of SEQ ID NO: 1674, (ii) the VL1 comprises the amino acid sequence of SEQ ID NO: 1204, (iii) the VH2 comprises the amino acid sequence of SEQ ID NO: 179, and (iv) the VL2 comprises the amino acid sequence of SEQ ID NO: 1248, or variants thereof in which an N-terminal glutamine or glutamate is replaced with pyroglutamate.

[0093] In some such antibodies, the VH1 comprises a vhCDR1, a vhCDR2, and a vhCDR3 contained within a variable heavy domain comprising the amino acid sequence of SEQ ID NO: 1200, (ii) the VL1 comprises a vlCDR1, a vlCDR2, and a vlCDR3 contained within a variable light domain comprising the amino acid sequence of SEQ ID NO: 1204, (iii) the VH2 comprises a vhCDR1, a vhCDR2, and a vhCDR3 contained within a variable heavy domain comprising the amino acid sequence of SEQ ID NO: 179, and (iv) the VL2 comprises a vlCDR1, a vlCDR2, and a vlCDR3 contained within a variable light domain comprising the amino acid sequence of SEQ ID NO: 1248, optionally wherein the CDRs are as defined by the Kabat, Chothia, Kabat+Chothia, AbM, contact, or IMGT definition. In some such antibodies, the VH1 comprises a vhCDR1 comprising the amino acid sequence of SEQ ID NO: 1201, a vhCDR2 comprising the amino acid sequence of SEQ ID NO: 1202, and a vhCDR3 comprising the amino acid sequence of SEQ ID NO: 1203, (ii) the VL1 comprises a vlCDR1 comprising the amino acid sequence of SEQ ID NO: 106, a vlCDR2 comprising the amino acid sequence of SEQ ID NO: 107, and a vlCDR3 comprising the amino acid sequence of SEQ ID NO: 108, (iii) the VH2 comprises a vhCDR1 comprising the amino acid sequence of SEQ ID NO: 180, a vhCDR2 comprising the amino acid sequence of SEQ ID NO: 181, and a vhCDR3 comprising the amino acid sequence of SEQ ID NO: 182, and (iv) the VL2 comprises a vlCDR1 comprising the amino acid sequence of SEQ ID NO: 184, a vlCDR2 comprising the amino acid sequence of SEQ ID NO: 1249, and a vlCDR3 comprising the amino acid sequence of SEQ ID NO: 1250. In some such antibodies, the VH1 comprises the amino acid sequence SEQ ID NO: 1200, (ii) the VL1 comprises the amino acid sequence of SEQ ID NO: 1204, (iii) the VH2 comprises the amino acid sequence of SEQ ID NO: 179, and (iv) the VL2 comprises the amino acid sequence of SEQ ID NO: 1248, or variants thereof in which an N-terminal glutamine or glutamate is replaced with pyroglutamate.

[0094] In some such antibodies, the VH1 comprises a vhCDR1, a vhCDR2, and a vhCDR3 contained within a variable heavy domain comprising the amino acid sequence of SEQ ID NO: 2241, (ii) the VL1 comprises a vlCDR1, a vlCDR2, and a vlCDR3 contained within a variable light domain comprising the amino acid sequence of SEQ ID NO: 2243, (iii) the VH2 comprises a vhCDR1, a vhCDR2, and a vhCDR3 contained within a variable heavy domain comprising the amino acid sequence of SEQ ID NO: 2233, and (iv) the VL2 comprises a vlCDR1, a vlCDR2, and a vlCDR3 contained within a variable light domain comprising the amino acid sequence of SEQ ID NO: 2234, optionally wherein the CDRs are as defined by the Kabat, Chothia, Kabat+Chothia, AbM, contact, or IMGT definition. In some such antibodies, the VH1 comprises a vhCDR1 comprising the amino acid sequence of SEQ ID NO: 102, a vhCDR2 comprising the amino acid sequence of SEQ ID NO: 1924, and a vhCDR3 comprising the amino acid sequence of SEQ ID NO: 1203, (ii) the VL1 comprises a vlCDR1 comprising the amino acid sequence of SEQ ID NO: 106, a vlCDR2 comprising the amino acid sequence of SEQ ID NO: 107, and a vlCDR3 comprising the amino acid sequence of SEQ ID NO: 108, (iii) the VH2 comprises a vhCDR1 comprising the amino acid sequence of SEQ ID NO: 180, a vhCDR2 comprising the amino acid sequence of SEQ ID NO: 181, and a vhCDR3 comprising the amino acid sequence of SEQ ID NO: 182, and (iv) the VL2 comprises a vlCDR1 comprising the amino acid sequence of SEQ ID NO: 184, a vlCDR2 comprising the amino acid sequence of SEQ ID NO: 1249, and a vlCDR3 comprising the amino acid sequence of SEQ ID NO: 1250. In some such antibodies, the VH1 comprises the amino acid sequence of SEQ ID NO: 2241, (ii) the VL1 comprises the amino acid sequence of SEQ ID NO: 2243, (iii) the VH2 comprises the amino acid sequence of SEQ ID NO: 2233, and (iv) the VL2 comprises the amino acid sequence of SEQ ID NO: 2234, or variants thereof in which an N-terminal glutamine or glutamate is replaced with pyroglutamate. In some such antibodies, the bispecific antibody specifically binds human TL1A with a K_{D} of less than about 6.5E-11 M, less than about 6.4 E-11 M, or less than about 6.3E-11 as measured by surface plasmon resonance or Biacore at 25° C., optionally wherein the bispecific antibody specifically binds human TL1A with a K_{D} of less than about 3E-11 M, less than about 2.9E-11 M, less than about 2.8E-11 M, or less than about 2.7E-11 M. In some such antibodies, the bispecific antibody inhibits TL1A activity in a TL1A luciferase reporter assay with an IC₅₀ of less than about 4.5 nM. In some such antibodies, the bispecific antibody specifically binds human IL23 with a K_{D} of less than about 1.1E-10 M as measured by surface plasmon resonance or Biacore at 25° C., optionally wherein the bispecific antibody specifically binds human IL23 with a K_{D} of less than about 6E-11 M, less than about 5.9E-11 M, less than about 5.8E-11 M, or less than about 5.7E-11 M. In some such antibodies, the bispecific antibody inhibits IL23 activity in an IL23 luciferase reporter assay with an IC₅₀ of less than about 65 pM, less than about 64 pM, or less than about 63 pM, optionally wherein the bispecific antibody inhibits IL23 activity with an IC₅₀ of less than about 60 pM, less than about 59 pM, less than about 58 pM, less than about 57 pM, or less than about 56 pM.

[0095] In some such antibodies, the VH1 comprises a vhCDR1, a vhCDR2, and a vhCDR3 contained within a variable heavy domain comprising the amino acid sequence of SEQ ID NO: 2241, (ii) the VL1 comprises a vlCDR1, a vlCDR2, and a vlCDR3 contained within a variable light domain comprising the amino acid sequence of SEQ ID NO: 2243, (iii) the VH2 comprises a vhCDR1, a vhCDR2, and a vhCDR3 contained within a variable heavy domain comprising the amino acid sequence of SEQ ID NO: 2235, and (iv) the VL2 comprises a vlCDR1, a vlCDR2, and a vlCDR3 contained within a variable light domain comprising the amino acid sequence of SEQ ID NO: 2237, optionally wherein the CDRs are as defined by the Kabat, Chothia, Kabat+Chothia, AbM, contact, or IMGT definition. In some such antibodies, the VH1 comprises a vhCDR1 comprising the amino acid sequence of SEQ ID NO: 102, a vhCDR2 comprising the amino acid sequence of SEQ ID NO: 1924, and a vhCDR3 comprising the amino acid sequence of SEQ ID NO: 1203, (ii) the VL1 comprises a vlCDR1 comprising the amino acid sequence of SEQ ID NO: 106, a vlCDR2 comprising the amino acid sequence of SEQ ID NO: 107, and a vlCDR3 comprising the amino acid sequence of SEQ ID NO: 108, (iii) the VH2 comprises a vhCDR1 comprising the amino acid sequence of SEQ ID NO: 180, a vhCDR2 comprising the amino acid sequence of SEQ ID NO: 181, and a vhCDR3 comprising the amino acid sequence of SEQ ID NO: 2236, and (iv) the VL2 comprises a vlCDR1 comprising the amino acid sequence of SEQ ID NO: 184, a vlCDR2 comprising the amino acid sequence of SEQ ID NO: 2238, and a vlCDR3 comprising the amino acid sequence of SEQ ID NO: 1250. In some such antibodies, the VH1 comprises the amino acid sequence of SEQ ID NO: 2241, (ii) the VL1 comprises the amino acid sequence of SEQ ID NO: 2243, (iii) the VH2 comprises the amino acid sequence of SEQ ID NO: 2235, and (iv) the VL2 comprises the amino acid sequence of SEQ ID NO: 2237, or variants thereof in which an N-terminal glutamine or glutamate is replaced with pyroglutamate.

[0096] In some such antibodies, the VH1 comprises a vhCDR1, a vhCDR2, and a vhCDR3 contained within a variable heavy domain comprising the amino acid sequence of SEQ ID NO: 2253, (ii) the VL1 comprises a vlCDR1, a vlCDR2, and a vlCDR3 contained within a variable light domain comprising the amino acid sequence of SEQ ID NO: 2243, (iii) the VH2 comprises a vhCDR1, a vhCDR2, and a vhCDR3 contained within a variable heavy domain comprising the amino acid sequence of SEQ ID NO: 2233, and (iv) the VL2 comprises a vlCDR1, a vlCDR2, and a vlCDR3 contained within a variable light domain comprising the amino acid sequence of SEQ ID NO: 2234, optionally wherein the CDRs are as defined by the Kabat, Chothia, Kabat+Chothia, AbM, contact, or IMGT definition. In some such antibodies, the VH1 comprises a vhCDR1 comprising the amino acid sequence of SEQ ID NO: 1201, a vhCDR2 comprising the amino acid sequence of SEQ ID NO: 1202, and a vhCDR3 comprising the amino acid sequence of SEQ ID NO: 1203, (ii) the VL1 comprises a vlCDR1 comprising the amino acid sequence of SEQ ID NO: 106, a vlCDR2 comprising the amino acid sequence of SEQ ID NO: 107, and a vlCDR3 comprising the amino acid sequence of SEQ ID NO: 108, (iii) the VH2 comprises a vhCDR1 comprising the amino acid sequence of SEQ ID NO: 180, a vhCDR2 comprising the amino acid sequence of SEQ ID NO: 181, and a vhCDR3 comprising the amino acid sequence of SEQ ID NO: 182, and (iv) the VL2 comprises a vlCDR1 comprising the amino acid sequence of SEQ ID NO: 184, a vlCDR2 comprising the amino acid sequence of SEQ ID NO: 1249, and a vlCDR3 comprising the amino acid sequence of SEQ ID NO: 1250. In some such antibodies, the VH1 comprises the amino acid sequence of SEQ ID NO: 2253, (ii) the VL1 comprises the amino acid sequence of SEQ ID NO: 2243, (iii) the VH2 comprises the amino acid sequence of SEQ ID NO: 2233, and (iv) the VL2 comprises the amino acid sequence of SEQ ID NO: 2234, or variants thereof in which an N-terminal glutamine or glutamate is replaced with pyroglutamate.

[0097] In some such antibodies, the VH1 comprises a vhCDR1, a vhCDR2, and a vhCDR3 contained within a variable heavy domain comprising the amino acid sequence of SEQ ID NO: 2259, (ii) the VL1 comprises a vlCDR1, a vlCDR2, and a vlCDR3 contained within a variable light domain comprising the amino acid sequence of SEQ ID NO: 2243, (iii) the VH2 comprises a vhCDR1, a vhCDR2, and a vhCDR3 contained within a variable heavy domain comprising the amino acid sequence of SEQ ID NO: 2233, and (iv) the VL2 comprises a vlCDR1, a vlCDR2, and a vlCDR3 contained within a variable light domain comprising the amino acid sequence of SEQ ID NO: 2234, optionally wherein the CDRs are as defined by the Kabat, Chothia, Kabat+Chothia, AbM, contact, or IMGT definition. In some such antibodies, the VH1 comprises a vhCDR1 comprising the amino acid sequence of SEQ ID NO: 102, a vhCDR2 comprising the amino acid sequence of SEQ ID NO: 1924, and a vhCDR3 comprising the amino acid sequence of SEQ ID NO: 104, (ii) the VL1 comprises a vlCDR1 comprising the amino acid sequence of SEQ ID NO: 106, a vlCDR2 comprising the amino acid sequence of SEQ ID NO: 107, and a vlCDR3 comprising the amino acid sequence of SEQ ID NO: 108, (iii) the VH2 comprises a vhCDR1 comprising the amino acid sequence of SEQ ID NO: 180, a vhCDR2 comprising the amino acid sequence of SEQ ID NO: 181, and a vhCDR3 comprising the amino acid sequence of SEQ ID NO: 182, and (iv) the VL2 comprises a vlCDR1 comprising the amino acid sequence of SEQ ID NO: 184, a vlCDR2 comprising the amino acid sequence of SEQ ID NO: 1249, and a vlCDR3 comprising the amino acid sequence of SEQ ID NO: 1250. In some such antibodies, the VH1 comprises the amino acid sequence of SEQ ID NO: 2259, (ii) the VL1 comprises the amino acid sequence of SEQ ID NO: 2243, (iii) the VH2 comprises the amino acid sequence of SEQ ID NO: 2233, and (iv) the VL2 comprises the amino acid sequence of SEQ ID NO: 2234, or variants thereof in which an N-terminal glutamine or glutamate is replaced with pyroglutamate.

[0098] In some such antibodies, the first Fc domain and the second Fc domain comprise a set of heterodimerization skew variants. In some such antibodies, the first Fc domain and the second Fc domain each comprise one or more ablation variants. In some such antibodies, the first monomer or the second monomer comprises one or more pI variants. In some such antibodies, the first heavy chain constant domain comprises amino acid substitutions E233P/L234V/L235A/G236del/S267K and/or the second heavy chain constant domain comprises amino acid substitutions E233P/L234V/L235A/G236del/S267K, wherein numbering is according to EU numbering. In some such antibodies, the first heavy chain constant domain comprises amino acid substitutions M428L/N434S and/or the second heavy chain constant domain comprises amino acid substitutions M428L/N434S, wherein numbering is according to EU numbering. In some such antibodies, the first heavy chain constant domain comprises amino acid substitutions E233P/L234V/L235A/G236del/S267K and M428L/N434S and/or the second heavy chain constant domain comprises amino acid substitutions E233P/L234V/L235A/G236del/S267K and M428L/N434S, wherein numbering is according to EU numbering. In some such antibodies, the first heavy chain constant domain or the second heavy chain constant domain comprises amino acid substitutions L368D/K370S, wherein numbering is according to EU numbering. In some such antibodies, the first heavy chain constant domain or the second heavy chain constant domain comprises amino acid substitutions N208D/Q295E/N384D/Q418E/N421D, wherein numbering is according to EU numbering. In some such antibodies, the first heavy chain constant domain or the second heavy chain constant domain comprises amino acid substitutions E233P/L234V/L235A/G236del/S267K, M428L/N434S, L368D/K370S, and N208D/Q295E/N384D/Q418E/N421D, wherein numbering is according to EU numbering. In some such antibodies, the first heavy chain constant domain or the second heavy chain constant domain comprises amino acid substitutions E357Q/S364K, wherein numbering is according to EU numbering. In some such antibodies, the first heavy chain constant domain comprises amino acid substitutions L368D/K370S, and the second heavy chain constant domain comprises amino acid substitutions E357Q/S364K, wherein numbering is according to EU numbering. In some such antibodies, the first heavy chain constant domain or the second heavy chain constant domain comprises amino acid substitutions E233P/L234V/L235A/G236del/S267K, M428L/N434S, and E357Q/S364K, wherein numbering is according to EU numbering. In some such antibodies, the first heavy chain constant domain comprises amino acid substitutions E233P/L234V/L235A/G236del/S267K, M428L/N434S, L368D/K370S, and N208D/Q295E/N384D/Q418E/N421D, wherein numbering is according to EU numbering, and the second heavy chain constant domain comprises amino acid substitutions E233P/L234V/L235A/G236del/S267K, M428L/N434S, and E357Q/S364K, wherein numbering is according to EU numbering.

[0099] In some such antibodies, the first heavy chain constant domain is of isotype IgG1, and the second heavy chain constant domain is of isotype IgG1. In some such antibodies, the bispecific antibody is a chimeric or humanized bispecific antibody.

[0100] In some such antibodies, the first heavy chain comprises the amino acid sequence of SEQ ID NO: 2264 or a variant thereof in which the C-terminal lysine or the C-terminal lysine and glycine are removed, and the first light chain comprises the amino acid sequence of SEQ ID NO: 2265 or a variant thereof in which the N-terminal glutamine is replaced with pyroglutamate. In some such antibodies, the first heavy chain comprises the amino acid sequence of SEQ ID NO: 2264 or a variant thereof in which the C-terminal lysine or the C-terminal lysine and glycine are removed, and the first light chain comprises the amino acid sequence of SEQ ID NO: 2269 or a variant thereof in which the N-terminal glutamine is replaced with pyroglutamate. In some such antibodies, the first heavy chain is at least 90%, at least 95%, at least 96%, at least 97%, at least 98%, or at least 99% identical to the amino acid sequence of SEQ ID NO: 2264, and the first light chain is at least 90%, at least 95%, at least 96%, at least 97%, at least 98%, or at least 99% identical to the amino acid sequence of SEQ ID NO: 2265. In some such antibodies, the first heavy chain is at least 90%, at least 95%, at least 96%, at least 97%, at least 98%, or at least 99% identical to the amino acid sequence of SEQ ID NO: 2264, and the first light chain is at least 90%, at least 95%, at least 96%, at least 97%, at least 98%, or at least 99% identical to the amino acid sequence of SEQ ID NO: 2269. In some such antibodies, the second heavy chain comprises the amino acid sequence of SEQ ID NO: 2266 or a variant thereof in which the N-terminal glutamine is replaced with pyroglutamate and/or the C-terminal lysine or the C-terminal lysine and glycine are removed, and the second light chain comprises the amino acid sequence of SEQ ID NO: 2267. In some such antibodies, the second heavy chain is at least 90%, at least 95%, at least 96%, at least 97%, at least 98%, or at least 99% identical to the amino acid sequence of SEQ ID NO: 2266, and the second light chain is at least 90%, at least 95%, at least 96%, at least 97%, at least 98%, or at least 99% identical to the amino acid sequence of SEQ ID NO: 2267.

[0101] In some such antibodies, the first heavy chain, the first light chain, the second heavy chain, and the second light chain comprise any set of four chains from Table 31 or 32. In some such antibodies, the first heavy chain comprises the amino acid sequence of SEQ ID NO: 2264 or a variant thereof in which the C-terminal lysine or the C-terminal lysine and glycine are removed, the first light chain comprises the amino acid sequence of SEQ ID NO: 2265 or a variant thereof in which the N-terminal glutamine is replaced with pyroglutamate, the second heavy chain comprises the amino acid sequence of SEQ ID NO: 2266 or a variant thereof in which the N-terminal glutamine is replaced with pyroglutamate and/or the C-terminal lysine or the C-terminal lysine and glycine are removed, and the second light chain comprises the amino acid sequence of SEQ ID NO: 2267. In some such antibodies, the first heavy chain comprises the amino acid sequence of SEQ ID NO: 2264 or a variant thereof in which the C-terminal lysine or the C-terminal lysine and glycine are removed, the first light chain comprises the amino acid sequence of SEQ ID NO: 2269 or a variant thereof in which the N-terminal glutamine is replaced with pyroglutamate, the second heavy chain comprises the amino acid sequence of SEQ ID NO: 2266 or a variant thereof in which the N-terminal glutamine is replaced with pyroglutamate and/or the C-terminal lysine or the C-terminal lysine and glycine are removed, and the second light chain comprises the amino acid sequence of SEQ ID NO: 2267. In some such antibodies, the first heavy chain is at least 90%, at least 95%, at least 96%, at least 97%, at least 98%, or at least 99% identical to the amino acid sequence of SEQ ID NO: 2264, the first light chain is at least 90%, at least 95%, at least 96%, at least 97%, at least 98%, or at least 99% identical to the amino acid sequence of SEQ ID NO: 2265, the second heavy chain is at least 90%, at least 95%, at least 96%, at least 97%, at least 98%, or at least 99% identical to the amino acid sequence of SEQ ID NO: 2266, and the second light chain is at least 90%, at least 95%, at least 96%, at least 97%, at least 98%, or at least 99% identical to the amino acid sequence of SEQ ID NO: 2267. In some such antibodies, the first heavy chain is at least 90%, at least 95%, at least 96%, at least 97%, at least 98%, or at least 99% identical to the amino acid sequence of SEQ ID NO: 2264, the first light chain is at least 90%, at least 95%, at least 96%, at least 97%, at least 98%, or at least 99% identical to the amino acid sequence of SEQ ID NO: 2269, the second heavy chain is at least 90%, at least 95%, at least 96%, at least 97%, at least 98%, or at least 99% identical to the amino acid sequence of SEQ ID NO: 2266, and the second light chain is at least 90%, at least 95%, at least 96%, at least 97%, at least 98%, or at least 99% identical to the amino acid sequence of SEQ ID NO: 2267.

[0102] In some such antibodies, the bispecific antibody specifically binds human TL1A with a K_{D} of less than about 6.5E-11 M, less than about 6.4 E-11 M, or less than about 6.3E-11 as measured by surface plasmon resonance or Biacore at 25° C., optionally wherein the bispecific antibody specifically binds human TL1A with a K_{D} of less than about 3E-11 M, less than about 2.9E-11 M, less than about 2.8E-11 M, or less than about 2.7E-11 M. In some such antibodies, the bispecific antibody inhibits TL1A activity in a TL1A luciferase reporter assay with an IC₅₀ of less than about 4.5 nM. In some such antibodies, the bispecific antibody specifically binds human IL23 with a K_{D} of less than about 1.1E-10 M as measured by surface plasmon resonance or Biacore at 25° C., optionally wherein the bispecific antibody specifically binds human IL23 with a K_{D} of less than about 6E-11 M, less than about 5.9E-11 M, less than about 5.8E-11 M, or less than about 5.7E-11 M. In some such antibodies, the bispecific antibody inhibits IL23 activity in an IL23 luciferase reporter assay with an IC₅₀ of less than about 65 pM, less than about 64 pM, or less than about 63 pM, optionally wherein the bispecific antibody inhibits IL23 activity with an IC₅₀ of less than about 60 pM, less than about 59 pM, less than about 58 pM, less than about 57 pM, or less than about 56 pM.

[0103] In another aspect, provided is a bispecific antibody comprising: (a) a means for binding TL1A; and (b) a means for binding IL23. In another aspect, provided is a pharmaceutical composition comprising: (a) the above bispecific antibody; and (b) a pharmaceutically acceptable carrier. In another aspect, provided is a pharmaceutical composition comprising: (a) a first composition comprising a means for binding TL1A; and (b) a second composition comprising a means for binding IL23. In another aspect, provided is a pharmaceutical composition comprising: (a) a means for binding TL1A; (b) a means for binding IL23; and (c) a pharmaceutically acceptable carrier.

[0104] In another aspect, provided are pharmaceutical compositions comprising any of the above bispecific antibodies and a pharmaceutically acceptable carrier. In another aspect, provided are kits comprising any of the above bispecific antibodies or pharmaceutical compositions. In another aspect, provided are vessels or delivery devices comprising any of the above bispecific antibodies or pharmaceutical compositions. In another aspect, provided are nucleic acid compositions comprising a nucleic acid or a set of nucleic acids encoding any of the above bispecific antibodies. In another aspect, provided are expression vector compositions comprising an expression vector or a set of expression vectors comprising the above nucleic acid composition. In another aspect, provided are host cells comprising the expression vector composition. In another aspect, provided are methods of making a bispecific antibody, comprising culturing the host cell under conditions wherein the bispecific antibody is expressed, and recovering the bispecific antibody.

[0105] In another aspect, provided are methods of inhibiting or reducing TL1A-mediated activity and/or IL23-mediated activity in a subject in need thereof, comprising administering to the subject any of the above bispecific antibodies or pharmaceutical compositions. In another aspect, provided are any of the above bispecific antibodies or pharmaceutical compositions for use in inhibiting or reducing TL1A-mediated activity and/or IL23-mediated activity in a subject in need thereof. In another aspect, provided are uses of any of the above bispecific antibodies or pharmaceutical compositions for inhibiting or reducing TL1A-mediated activity and/or IL23-mediated activity in a subject in need thereof. In another aspect, provided are uses of any of the above bispecific antibodies or pharmaceutical compositions in the manufacture of a medicament for inhibiting or reducing TL1A-mediated activity and/or IL23-mediated activity in a subject in need thereof.

[0106] In another aspect, provided are methods of treating a TL1A-associated disease and/or IL23-associated disease in a subject in need thereof, comprising administering to the subject any of the above bispecific antibodies or pharmaceutical compositions. In another aspect, provided are any of the above bispecific antibodies or pharmaceutical compositions for use in the treatment of a TL1A-associated disease and/or IL23-associated disease in a subject in need thereof. In another aspect, provided are uses of any of the above bispecific antibodies or pharmaceutical compositions for the treatment of a TL1A-associated disease and/or IL23-associated disease in a subject in need thereof. In another aspect, provided are uses of any of the above bispecific antibodies or pharmaceutical compositions in the manufacture of a medicament for the treatment of a TL1A-associated disease and/or IL23-associated disease in a subject in need thereof. In some such methods, antibodies or compositions for use, or uses, the TL1A-associated disease and/or IL23-associated disease is an inflammatory disease, an autoimmune disease, or a fibrotic disease, optionally wherein the TL1A-associated disease and/or IL23-associated disease is an inflammatory bowel disease. In some such methods, antibodies or compositions for use, or uses, the subject is a human.

[0107] In another aspect, provided are antibodies comprising a TNF-like ligand 1A (TL1A) antigen-binding domain. In some such antibodies, the antibody comprises a variable heavy domain comprising a vhCDR1, a vhCDR2, and a vhCDR3 contained within a variable heavy domain comprising the amino acid sequence of any one of SEQ ID NOS: 2241, 2253, 2259, 1674, and 1200, and a variable light domain comprising a vlCDR1, a vlCDR2, and a vlCDR3 contained within a variable light domain comprising the amino acid sequence of any one of SEQ ID NOS: 2243 and 1204. In some such antibodies, the antibody comprises a variable heavy domain comprising a vhCDR1, a vhCDR2, and a vhCDR3 contained within a variable heavy domain comprising the amino acid sequence of SEQ ID NO: 2241, and a variable light domain comprising a vlCDR1, a vlCDR2, and a vlCDR3 contained within a variable light domain comprising the amino acid sequence of SEQ ID NO: 2243. In some such antibodies, the antibody comprises a variable heavy domain comprising a vhCDR1, a vhCDR2, and a vhCDR3 contained within a variable heavy domain comprising the amino acid sequence of SEQ ID NO: 2253, and a variable light domain comprising a vlCDR1, a vlCDR2, and a vlCDR3 contained within a variable light domain comprising the amino acid sequence of SEQ ID NO: 2243. In some such antibodies, the antibody comprises a variable heavy domain comprising a vhCDR1, a vhCDR2, and a vhCDR3 contained within a variable heavy domain comprising the amino acid sequence of SEQ ID NO: 2259, and a variable light domain comprising a vlCDR1, a vlCDR2, and a vlCDR3 contained within a variable light domain comprising the amino acid sequence of SEQ ID NO: 2243. In some such antibodies, the antibody comprises a variable heavy domain comprising a vhCDR1, a vhCDR2, and a vhCDR3 contained within a variable heavy domain comprising the amino acid sequence of SEQ ID NO: 1674, and a variable light domain comprising a vlCDR1, a vlCDR2, and a vlCDR3 contained within a variable light domain comprising the amino acid sequence of SEQ ID NO: 1204. In some such antibodies, the antibody comprises a variable heavy domain comprising a vhCDR1, a vhCDR2, and a vhCDR3 contained within a variable heavy domain comprising the amino acid sequence of SEQ ID NO: 1200, and a variable light domain comprising a vlCDR1, a vlCDR2, and a vlCDR3 contained within a variable light domain comprising the amino acid sequence of SEQ ID NO: 1204. In some such antibodies, the antibody comprises a variable heavy domain comprising a vhCDR1, a vhCDR2, and a vhCDR3 contained within a variable heavy domain comprising the amino acid sequence of any one of SEQ ID NOS: 1674, 1200, 1661, and 2323, and a variable light domain comprising a vlCDR1, a vlCDR2, and a vlCDR3 contained within a variable light domain comprising the amino acid sequence of SEQ ID NO: 1204. In some such antibodies, the antibody comprises a variable heavy domain comprising a vhCDR1, a vhCDR2, and a vhCDR3 contained within a variable heavy domain comprising the amino acid sequence of SEQ ID NO: 1661, and a variable light domain comprising a vlCDR1, a vlCDR2, and a vlCDR3 contained within a variable light domain comprising the amino acid sequence of SEQ ID NO: 1204. In some such antibodies, the antibody comprises a variable heavy domain comprising a vhCDR1, a vhCDR2, and a vhCDR3 contained within a variable heavy domain comprising the amino acid sequence of SEQ ID NO: 2323, and a variable light domain comprising a vlCDR1, a vlCDR2, and a vlCDR3 contained within a variable light domain comprising the amino acid sequence of SEQ ID NO: 1204. In some such antibodies, the antibody comprises a variable heavy domain comprising a vhCDR1, a vhCDR2, and a vhCDR3 and a variable light domain comprising a vlCDR1, a vlCDR2, and a vlCDR3 contained within a variable heavy domain and variable light domain pair in XENP53412, XENP53413, XENP53369, XENP53375, XENP53387, XENP53415, XENP53370, XENP53371, XENP53376, XENP53377, XENP53378, XENP53379, XENP53380, or XENP53414. Optionally, the CDRs in any of the above antibodies are as defined by the Kabat, Chothia, Kabat+Chothia, AbM, contact, or IMGT definition.

[0108] In some such antibodies, the antibody comprises a variable heavy domain comprising a vhCDR1 comprising the amino acid sequence of SEQ ID NO: 102 or 1201, a vhCDR2 comprising the amino acid sequence of SEQ ID NO: 1924 or 1202, and a vhCDR3 comprising the amino acid sequence of SEQ ID NO: 1203 or 104, and a variable light domain comprising a vlCDR1 comprising the amino acid sequence of SEQ ID NO: 106, a vlCDR2 comprising the amino acid sequence of SEQ ID NO: 107, and a vlCDR3 comprising the amino acid sequence of SEQ ID NO: 108. In some such antibodies, the antibody comprises a variable heavy domain comprising a vhCDR1 comprising the amino acid sequence of SEQ ID NO: 102, a vhCDR2 comprising the amino acid sequence of SEQ ID NO: 1924, and a vhCDR3 comprising the amino acid sequence of SEQ ID NO: 1203, and a variable light domain comprising a vlCDR1 comprising the amino acid sequence of SEQ ID NO: 106, a vlCDR2 comprising the amino acid sequence of SEQ ID NO: 107, and a vlCDR3 comprising the amino acid sequence of SEQ ID NO: 108. In some such antibodies, the antibody comprises a variable heavy domain comprising a vhCDR1 comprising the amino acid sequence of SEQ ID NO: 1201, a vhCDR2 comprising the amino acid sequence of SEQ ID NO: 1202, and a vhCDR3 comprising the amino acid sequence of SEQ ID NO: 1203, and a variable light domain comprising a vlCDR1 comprising the amino acid sequence of SEQ ID NO: 106, a vlCDR2 comprising the amino acid sequence of SEQ ID NO: 107, and a vlCDR3 comprising the amino acid sequence of SEQ ID NO: 108. In some such antibodies, the antibody comprises a variable heavy domain comprising a vhCDR1 comprising the amino acid sequence of SEQ ID NO: 102, a vhCDR2 comprising the amino acid sequence of SEQ ID NO: 1924, and a vhCDR3 comprising the amino acid sequence of SEQ ID NO: 104, and a variable light domain comprising a vlCDR1 comprising the amino acid sequence of SEQ ID NO: 106, a vlCDR2 comprising the amino acid sequence of SEQ ID NO: 107, and a vlCDR3 comprising the amino acid sequence of SEQ ID NO: 108. In some such antibodies, the antibody comprises a variable heavy domain comprising a vhCDR1 comprising the amino acid sequence of SEQ ID NO: 102, a vhCDR2 comprising the amino acid sequence of SEQ ID NO: 1926, and a vhCDR3 comprising the amino acid sequence of SEQ ID NO: 104, and a variable light domain comprising a vlCDR1 comprising the amino acid sequence of SEQ ID NO: 106, a vlCDR2 comprising the amino acid sequence of SEQ ID NO: 107, and a vlCDR3 comprising the amino acid sequence of SEQ ID NO: 108.

[0109] In some such antibodies, the variable heavy domain is at least 90%, at least 95%, at least 96%, at least 97%, at least 98%, or at least 99% identical to the amino acid sequence of any one of SEQ ID NOS: 2241, 2253, 2259, 1674, and 1200, and the variable light domain is at least 90%, at least 95%, at least 96%, at least 97%, at least 98%, or at least 99% identical to the amino acid sequence of any one of SEQ ID NOS: 2243 and 1204. In some such antibodies, the variable heavy domain is at least 90%, at least 95%, at least 96%, at least 97%, at least 98%, or at least 99% identical to the amino acid sequence of SEQ ID NO: 2241, and the variable light domain is at least 90%, at least 95%, at least 96%, at least 97%, at least 98%, or at least 99% identical to the amino acid sequence of SEQ ID NO: 2243. In some such antibodies, the variable heavy domain is at least 90%, at least 95%, at least 96%, at least 97%, at least 98%, or at least 99% identical to the amino acid sequence of SEQ ID NO: 2253, and the variable light domain is at least 90%, at least 95%, at least 96%, at least 97%, at least 98%, or at least 99% identical to the amino acid sequence of SEQ ID NO: 2243. In some such antibodies, the variable heavy domain is at least 90%, at least 95%, at least 96%, at least 97%, at least 98%, or at least 99% identical to the amino acid sequence of SEQ ID NO: 2259, and the variable light domain is at least 90%, at least 95%, at least 96%, at least 97%, at least 98%, or at least 99% identical to the amino acid sequence of SEQ ID NO: 2243. In some such antibodies, the variable heavy domain is at least 90%, at least 95%, at least 96%, at least 97%, at least 98%, or at least 99% identical to the amino acid sequence of SEQ ID NO: 1674, and the variable light domain is at least 90%, at least 95%, at least 96%, at least 97%, at least 98%, or at least 99% identical to the amino acid sequence of SEQ ID NO: 1204. In some such antibodies, variable heavy domain is at least 90%, at least 95%, at least 96%, at least 97%, at least 98%, or at least 99% identical to the amino acid sequence of SEQ ID NO: 1200, and the variable light domain is at least 90%, at least 95%, at least 96%, at least 97%, at least 98%, or at least 99% identical to the amino acid sequence of SEQ ID NO: 1204. In some such antibodies, the variable heavy domain is at least 90%, at least 95%, at least 96%, at least 97%, at least 98%, or at least 99% identical to the amino acid sequence of any one of SEQ ID NOS: 1427-1823 and 2316-2330, and the variable light domain is at least 90%, at least 95%, at least 96%, at least 97%, at least 98%, or at least 99% identical to the amino acid sequence of any one of SEQ ID NOS: 1824-1923. In some such antibodies, the variable heavy domain is at least 90%, at least 95%, at least 96%, at least 97%, at least 98%, or at least 99% identical to the amino acid sequence of any one of SEQ ID NOS: 1674, 1200, 1661, and 2323, and the variable light domain is at least 90%, at least 95%, at least 96%, at least 97%, at least 98%, or at least 99% identical to the amino acid sequence of SEQ ID NO: 1204. In some such antibodies, the variable heavy domain is at least 90%, at least 95%, at least 96%, at least 97%, at least 98%, or at least 99% identical to the amino acid sequence of SEQ ID NO: 1661, and the variable light domain is at least 90%, at least 95%, at least 96%, at least 97%, at least 98%, or at least 99% identical to the amino acid sequence of SEQ ID NO: 1204. In some such antibodies, the variable heavy domain is at least 90%, at least 95%, at least 96%, at least 97%, at least 98%, or at least 99% identical to the amino acid sequence of SEQ ID NO: 2323, and the variable light domain is at least 90%, at least 95%, at least 96%, at least 97%, at least 98%, or at least 99% identical to the amino acid sequence of SEQ ID NO: 1204. In some such antibodies, the variable heavy domain and the variable light domain are at least 90%, at least 95%, at least 96%, at least 97%, at least 98%, or at least 99% identical to any pair of anti-TL1A variable heavy domain and variable light domain in XENP53412, XENP53413, XENP53369, XENP53375, XENP53387, XENP53415, XENP53370, XENP53371, XENP53376, XENP53377, XENP53378, XENP53379, XENP53380, or XENP53414. In some such antibodies, the variable heavy domain and the variable light domain are at least 90%, at least 95%, at least 96%, at least 97%, at least 98%, or at least 99% identical to any pair of anti-TL1A variable heavy domain and variable light domain in Table 29 or 33.

[0110] In some such antibodies, the variable heavy domain comprises the amino acid sequence of any one of SEQ ID NOS: 2241, 2253, 2259, 1674, and 1200, and the variable light domain comprises the amino acid sequence of any one of SEQ ID NOS: 2243 and 1204. In some such antibodies, the variable heavy domain comprises the amino acid sequence of SEQ ID NO: 2241, and the variable light domain comprises the amino acid sequence of SEQ ID NO: 2243. In some such antibodies, the variable heavy domain comprises the amino acid sequence of SEQ ID NO: 2253, and the variable light domain comprises the amino acid sequence of SEQ ID NO: 2243. In some such antibodies, the variable heavy domain comprises the amino acid sequence of SEQ ID NO: 2259, and the variable light domain comprises the amino acid sequence of SEQ ID NO: 2243. In some such antibodies, the variable heavy domain comprises the amino acid sequence of SEQ ID NO: 1674, and the variable light domain comprises the amino acid sequence of SEQ ID NO: 1204. In some such antibodies, the variable heavy domain comprises the amino acid sequence of SEQ ID NO: 1200, and the variable light domain comprises the amino acid sequence of SEQ ID NO: 1204. In some such antibodies, the variable heavy domain comprises the amino acid sequence of any one of SEQ ID NOS: 1427-1823 and 2316-2330, and the variable light domain comprises the amino acid sequence of any one of SEQ ID NOS: 1824-1923. In some such antibodies, the variable heavy domain comprises the amino acid sequence of any one of SEQ ID NOS: 1674, 1200, 1661, and 2323, and the variable light domain comprises the amino acid sequence of SEQ ID NO: 1204. In some such antibodies, the variable heavy domain comprises the amino acid sequence of SEQ ID NO: 1661, and the variable light domain comprises the amino acid sequence of SEQ ID NO: 1204. In some such antibodies, the variable heavy domain comprises the amino acid sequence of SEQ ID NO: 2323, and the variable light domain comprises the amino acid sequence of SEQ ID NO: 1204. In some such antibodies, the variable heavy domain and the variable light domain comprise any pair of anti-TL1A variable heavy domain and variable light domain in XENP53412, XENP53413, XENP53369, XENP53375, XENP53387, XENP53415, XENP53370, XENP53371, XENP53376, XENP53377, XENP53378, XENP53379, XENP53380, or XENP53414. In some such antibodies, the variable heavy domain and the variable light domain comprise any pair of anti-TL1A variable heavy domain and variable light domain in Table 29 or 33. In some such antibodies, the variable heavy domain or the variable light domain can comprise variants of any of the above in which an N-terminal glutamine or glutamate is replaced with pyroglutamate.

[0111] In some such antibodies, (i) the variable heavy domain comprises a vhCDR1, a vhCDR2, and a vhCDR3 contained within a variable heavy domain comprising the amino acid sequence of any one of SEQ ID NOS: 2241, 2253, 2259, 1674, and 1200, and (ii) the variable light domain comprises a vlCDR1, a vlCDR2, and a vlCDR3 contained within a variable light domain comprising the amino acid sequence of any one of SEQ ID NOS: 2243 and 1204, optionally wherein the CDRs are as defined by the Kabat, Chothia, Kabat+Chothia, AbM, contact, or IMGT definition. In some such antibodies, (i) the variable heavy domain comprises a vhCDR1 comprising the amino acid sequence of SEQ ID NO: 102 or 1201, a vhCDR2 comprising the amino acid sequence of SEQ ID NO: 1924 or 1202, and a vhCDR3 comprising the amino acid sequence of SEQ ID NO: 1203 or 104, and (ii) the variable light domain comprises a vlCDR1 comprising the amino acid sequence of SEQ ID NO: 106, a vlCDR2 comprising the amino acid sequence of SEQ ID NO: 107, and a vlCDR3 comprising the amino acid sequence of SEQ ID NO: 108. In some such antibodies, (i) the variable heavy domain comprises the amino acid sequence of any one of SEQ ID NOS: 2241, 2253, 2259, 1674, and 1200, and (ii) the variable light domain comprises the amino acid sequence of any one of SEQ ID NOS: 2243 and 1204, or variants thereof in which an N-terminal glutamine or glutamate is replaced with pyroglutamate. In some such antibodies, the antibody specifically binds human TL1A with a K_{D} of less than about 6.5E-11 M, less than about 6.4 E-11 M, or less than about 6.3E-11 as measured by surface plasmon resonance or Biacore at 25° C., optionally wherein the antibody specifically binds human TL1A with a K_{D} of less than about 3E-11 M, less than about 2.9E-11 M, less than about 2.8E-11 M, or less than about 2.7E-11 M. In some such antibodies, the antibody inhibits TL1A activity in a TL1A luciferase reporter assay with an IC₅₀ of less than about 4.5 nM.

[0112] In some such antibodies, (i) the variable heavy domain comprises a vhCDR1, a vhCDR2, and a vhCDR3 contained within a variable heavy domain comprising the amino acid sequence of SEQ ID NO: 2241, and (ii) the variable light domain comprises a vlCDR1, a vlCDR2, and a vlCDR3 contained within a variable light domain comprising the amino acid sequence of SEQ ID NO: 2243, optionally wherein the CDRs are as defined by the Kabat, Chothia, Kabat+Chothia, AbM, contact, or IMGT definition. In some such antibodies, (i) the variable heavy domain comprises a vhCDR1 comprising the amino acid sequence of SEQ ID NO: 102, a vhCDR2 comprising the amino acid sequence of SEQ ID NO: 1924, and a vhCDR3 comprising the amino acid sequence of SEQ ID NO: 1203, and (ii) the variable light domain comprises a vlCDR1 comprising the amino acid sequence of SEQ ID NO: 106, a vlCDR2 comprising the amino acid sequence of SEQ ID NO: 107, and a vlCDR3 comprising the amino acid sequence of SEQ ID NO: 108. In some such antibodies, (i) the variable heavy domain comprises the amino acid sequence of SEQ ID NO: 2241, and (ii) the variable light domain comprises the amino acid sequence of SEQ ID NO: 2243, or variants thereof in which an N-terminal glutamine or glutamate is replaced with pyroglutamate. In some such antibodies, the antibody specifically binds human TL1A with a K_{D} of less than about 6.5E-11 M, less than about 6.4 E-11 M, or less than about 6.3E-11 as measured by surface plasmon resonance or Biacore at 25° C., optionally wherein the antibody specifically binds human TL1A with a K_{D} of less than about 3E-11 M, less than about 2.9E-11 M, less than about 2.8E-11 M, or less than about 2.7E-11 M. In some such antibodies, the antibody inhibits TL1A activity in a TL1A luciferase reporter assay with an IC₅₀ of less than about 4.5 nM.

[0113] In some such antibodies, (i) the variable heavy domain comprises a vhCDR1, a vhCDR2, and a vhCDR3 contained within a variable heavy domain comprising the amino acid sequence of SEQ ID NO: 2253, and (ii) the variable light domain comprises a vlCDR1, a vlCDR2, and a vlCDR3 contained within a variable light domain comprising the amino acid sequence of SEQ ID NO: 2243, optionally wherein the CDRs are as defined by the Kabat, Chothia, Kabat+Chothia, AbM, contact, or IMGT definition. In some such antibodies, (i) the variable heavy domain comprises a vhCDR1 comprising the amino acid sequence of SEQ ID NO: 1201, a vhCDR2 comprising the amino acid sequence of SEQ ID NO: 1202, and a vhCDR3 comprising the amino acid sequence of SEQ ID NO: 1203, and (ii) the variable light domain comprises a vlCDR1 comprising the amino acid sequence of SEQ ID NO: 106, a vlCDR2 comprising the amino acid sequence of SEQ ID NO: 107, and a vlCDR3 comprising the amino acid sequence of SEQ ID NO: 108. In some such antibodies, (i) the variable heavy domain comprises the amino acid sequence of SEQ ID NO: 2253, and (ii) the variable light domain comprises the amino acid sequence of SEQ ID NO: 2243, or variants thereof in which an N-terminal glutamine or glutamate is replaced with pyroglutamate.

[0114] In some such antibodies, (i) the variable heavy domain comprises a vhCDR1, a vhCDR2, and a vhCDR3 contained within a variable heavy domain comprising the amino acid sequence of SEQ ID NO: 2259, and (ii) the variable light domain comprises a vlCDR1, a vlCDR2, and a vlCDR3 contained within a variable light domain comprising the amino acid sequence of SEQ ID NO: 2243, optionally wherein the CDRs are as defined by the Kabat, Chothia, Kabat+Chothia, AbM, contact, or IMGT definition. In some such antibodies, (i) the variable heavy domain comprises a vhCDR1 comprising the amino acid sequence of SEQ ID NO: 102, a vhCDR2 comprising the amino acid sequence of SEQ ID NO: 1924, and a vhCDR3 comprising the amino acid sequence of SEQ ID NO: 104, and (ii) the variable light domain comprises a vlCDR1 comprising the amino acid sequence of SEQ ID NO: 106, a vlCDR2 comprising the amino acid sequence of SEQ ID NO: 107, and a vlCDR3 comprising the amino acid sequence of SEQ ID NO: 108. In some such antibodies, (i) the variable heavy domain comprises the amino acid sequence of SEQ ID NO: 2259, and (ii) the variable light domain comprises the amino acid sequence of SEQ ID NO: 2243, or variants thereof in which an N-terminal glutamine or glutamate is replaced with pyroglutamate.

[0115] In some such antibodies, (i) the variable heavy domain comprises a vhCDR1, a vhCDR2, and a vhCDR3 contained within a variable heavy domain comprising the amino acid sequence of SEQ ID NO: 1674, and (ii) the variable light domain comprises a vlCDR1, a vlCDR2, and a vlCDR3 contained within a variable light domain comprising the amino acid sequence of SEQ ID NO: 1204, optionally wherein the CDRs are as defined by the Kabat, Chothia, Kabat+Chothia, AbM, contact, or IMGT definition. In some such antibodies, (i) the variable heavy domain comprises a vhCDR1 comprising the amino acid sequence of SEQ ID NO: 102, a vhCDR2 comprising the amino acid sequence of SEQ ID NO: 1924, and a vhCDR3 comprising the amino acid sequence of SEQ ID NO: 1203, and (ii) the variable light domain comprises a vlCDR1 comprising the amino acid sequence of SEQ ID NO: 106, a vlCDR2 comprising the amino acid sequence of SEQ ID NO: 107, and a vlCDR3 comprising the amino acid sequence of SEQ ID NO: 108. In some such antibodies, (i) the variable heavy domain comprises the amino acid sequence of SEQ ID NO: 1674, and (ii) the variable light domain comprises the amino acid sequence of SEQ ID NO: 1204, or variants thereof in which an N-terminal glutamine or glutamate is replaced with pyroglutamate.

[0116] In some such antibodies, (i) the variable heavy domain comprises a vhCDR1, a vhCDR2, and a vhCDR3 contained within a variable heavy domain comprising the amino acid sequence of SEQ ID NO: 1200, and (ii) the variable light domain comprises a vlCDR1, a vlCDR2, and a vlCDR3 contained within a variable light domain comprising the amino acid sequence of SEQ ID NO: 1204, optionally wherein the CDRs are as defined by the Kabat, Chothia, Kabat+Chothia, AbM, contact, or IMGT definition. In some such antibodies, (i) the variable heavy domain comprises a vhCDR1 comprising the amino acid sequence of SEQ ID NO: 1201, a vhCDR2 comprising the amino acid sequence of SEQ ID NO: 1202, and a vhCDR3 comprising the amino acid sequence of SEQ ID NO: 1203, and (ii) the variable light domain comprises a vlCDR1 comprising the amino acid sequence of SEQ ID NO: 106, a vlCDR2 comprising the amino acid sequence of SEQ ID NO: 107, and a vlCDR3 comprising the amino acid sequence of SEQ ID NO: 108. In some such antibodies, (i) the variable heavy domain comprises the amino acid sequence SEQ ID NO: 1200, and (ii) the variable light domain comprises the amino acid sequence of SEQ ID NO: 1204, or variants thereof in which an N-terminal glutamine or glutamate is replaced with pyroglutamate.

[0117] In some such antibodies, the antibody is a chimeric or humanized antibody. In some such antibodies, the antibody is an antigen-binding fragment of an intact antibody.

[0118] In some such antibodies, the antibody comprises a heavy chain constant domain and a light chain constant domain. In some such antibodies, the heavy chain constant domain is of isotype IgG1.

[0119] In some such antibodies, the heavy chain constant domain comprise a set of heterodimerization skew variants. In some such antibodies, the heavy chain constant domain each comprise one or more ablation variants. In some such antibodies, the heavy chain constant domain comprises one or more pI variants. In some such antibodies, the heavy chain constant domain comprises amino acid substitutions E233P/L234V/L235A/G236del/S267K, wherein numbering is according to EU numbering. In some such antibodies, the heavy chain constant domain comprises amino acid substitutions M428L/N434S, wherein numbering is according to EU numbering. In some such antibodies, the heavy chain constant domain comprises amino acid substitutions E233P/L234V/L235A/G236del/S267K and M428L/N434S, wherein numbering is according to EU numbering. In some such antibodies, the heavy chain constant domain comprises amino acid substitutions L368D/K370S, wherein numbering is according to EU numbering. In some such antibodies, the heavy chain constant domain comprises amino acid substitutions N208D/Q295E/N384D/Q418E/N421D, wherein numbering is according to EU numbering. In some such antibodies, the heavy chain constant domain comprises amino acid substitutions E233P/L234V/L235A/G236del/S267K, M428L/N434S, L368D/K370S, and N208D/Q295E/N384D/Q418E/N421D, wherein numbering is according to EU numbering. In some such antibodies, the heavy chain constant domain comprises amino acid substitutions E357Q/S364K, wherein numbering is according to EU numbering. In some such antibodies, the heavy chain constant domain comprises amino acid substitutions E233P/L234V/L235A/G236del/S267K, M428L/N434S, and E357Q/S364K, wherein numbering is according to EU numbering. In some such antibodies, the variable heavy domain comprises amino acid substitution Q39E and the variable light domain comprises amino acid substitution Q38K, wherein numbering is according to Kabat numbering. In some such antibodies, the variable heavy domain comprises amino acid substitution Q39K and the variable light domain comprises amino acid substitution Q38E, wherein numbering is according to Kabat numbering. In some such antibodies, the heavy chain constant domain comprises amino acid substitution A141F and the light chain constant domain comprises amino acid substitution F118A, wherein numbering is according to EU numbering. In some such antibodies, the heavy chain constant domain comprises amino acid substitutions K213E/K218D and the light chain constant domain comprises amino acid substitutions D122K/E123K, wherein numbering is according to EU numbering. In some such antibodies, the variable heavy domain comprises amino acid substitution Q39E and the variable light domain comprises amino acid substitution Q38K according to Kabat numbering, and the heavy chain constant domain comprises amino acid substitutions K213E/K218D according to EU numbering and the light chain constant domain comprises amino acid substitutions D122K/E123K according to Kabat numbering. In some such antibodies, the variable heavy domain comprises amino acid substitution Q39K and the variable light domain comprises amino acid substitution Q38E according to Kabat numbering, and the heavy chain constant domain comprises amino acid substitution A141F according to EU numbering and the light chain constant domain comprises amino acid substitution F118A according to Kabat numbering. In some such antibodies, the variable heavy domain comprises amino acid substitution Q39E and the variable light domain comprises amino acid substitution Q38K according to Kabat numbering, and the heavy chain constant domain comprises amino acid substitutions E233P/L234V/L235A/G236del/S267K, M428L/N434S, L368D/K370S, N208D/Q295E/N384D/Q418E/N421D, and K213E/K218D according to EU numbering and the light chain constant domain comprises amino acid substitutions D122K/E123K according to Kabat numbering. In some such antibodies, the variable heavy domain comprises amino acid substitution Q39K and the variable light domain comprises amino acid substitution Q38E according to Kabat numbering, and the heavy chain constant domain comprises amino acid substitutions E233P/L234V/L235A/G236del/S267K, M428L/N434S, E357Q/S364K, and A141F according to EU numbering and the light chain constant domain comprises amino acid substitution F118A according to Kabat numbering. In some such antibodies, the heavy chain constant domain comprises amino acid substitutions E233P/L234V/L235A/G236del/S267K, M428L/N434S, E357Q/S364K, and K213E/K218D according to EU numbering and the light chain constant domain comprises amino acid substitutions D122K/E123K according to Kabat numbering.

[0120] In some such antibodies, the antibody comprises a heavy chain comprising the amino acid sequence of SEQ ID NO: 2240 or a variant thereof in which the N-terminal glutamine is replaced with pyroglutamate and/or the C-terminal lysine or the C-terminal lysine and glycine are removed, and a light chain comprising the amino acid sequence of SEQ ID NO: 2242. In some such antibodies, the antibody comprises a heavy chain comprising the amino acid sequence of SEQ ID NO: 2252 or a variant thereof in which the N-terminal glutamine is replaced with pyroglutamate and/or the C-terminal lysine or the C-terminal lysine and glycine are removed, and a light chain comprising the amino acid sequence of SEQ ID NO: 2242. In some such antibodies, the antibody comprises a heavy chain comprising the amino acid sequence of SEQ ID NO: 2258 or a variant thereof in which the N-terminal glutamine is replaced with pyroglutamate and/or the C-terminal lysine or the C-terminal lysine and glycine are removed, and a light chain comprising the amino acid sequence of SEQ ID NO: 2242. In some such antibodies, the antibody comprises a heavy chain comprising the amino acid sequence of SEQ ID NO: 2264 or a variant thereof in which the C-terminal lysine or the C-terminal lysine and glycine are removed, and a light chain comprising the amino acid sequence of SEQ ID NO: 2265 or a variant thereof in which the N-terminal glutamine is replaced with pyroglutamate. In some such antibodies, the antibody comprises a heavy chain comprising the amino acid sequence of SEQ ID NO: 2264 or a variant thereof in which the C-terminal lysine or the C-terminal lysine and glycine are removed, and a light chain comprising the amino acid sequence of SEQ ID NO: 2269 or a variant thereof in which the N-terminal glutamine is replaced with pyroglutamate. In some such antibodies, the antibody comprises a heavy chain at least 90%, at least 95%, at least 96%, at least 97%, at least 98%, or at least 99% identical to the amino acid sequence of SEQ ID NO: 2240, and a light chain at least 90%, at least 95%, at least 96%, at least 97%, at least 98%, or at least 99% identical to the amino acid sequence of SEQ ID NO: 2242. In some such antibodies, the antibody comprises a heavy chain at least 90%, at least 95%, at least 96%, at least 97%, at least 98%, or at least 99% identical to the amino acid sequence of SEQ ID NO: 2252, and a light chain at least 90%, at least 95%, at least 96%, at least 97%, at least 98%, or at least 99% identical to the amino acid sequence of SEQ ID NO: 2242. In some such antibodies, the antibody comprises a heavy chain at least 90%, at least 95%, at least 96%, at least 97%, at least 98%, or at least 99% identical to the amino acid sequence of SEQ ID NO: 2258, and a light chain at least 90%, at least 95%, at least 96%, at least 97%, at least 98%, or at least 99% identical to the amino acid sequence of SEQ ID NO: 2242. In some such antibodies, the antibody comprises a heavy chain at least 90%, at least 95%, at least 96%, at least 97%, at least 98%, or at least 99% identical to the amino acid sequence of SEQ ID NO: 2264, and a light chain at least 90%, at least 95%, at least 96%, at least 97%, at least 98%, or at least 99% identical to the amino acid sequence of SEQ ID NO: 2265. In some such antibodies, the antibody comprises a heavy chain at least 90%, at least 95%, at least 96%, at least 97%, at least 98%, or at least 99% identical to the amino acid sequence of SEQ ID NO: 2264, and a light chain at least 90%, at least 95%, at least 96%, at least 97%, at least 98%, or at least 99% identical to the amino acid sequence of SEQ ID NO: 2269.

[0121] In some such antibodies, the antibody specifically binds human TL1A with a K_{D} of less than about 6.5E-11 M, less than about 6.4 E-11 M, or less than about 6.3E-11 as measured by surface plasmon resonance or Biacore at 25° C., optionally wherein the antibody specifically binds human TL1A with a K_{D} of less than about 3E-11 M, less than about 2.9E-11 M, less than about 2.8E-11 M, or less than about 2.7E-11 M. In some such antibodies, the antibody inhibits TL1A activity in a TL1A luciferase reporter assay with an IC₅₀ of less than about 4.5 nM.

[0122] In some such antibodies, wherein the antibody is a bispecific antibody or multispecific antibody. In some such antibodies, the bispecific antibody or multispecific antibody further comprises an interleukin-23 (IL23) antigen-binding domain. In some such antibodies, the bispecific antibody or multispecific antibody further comprises a means for binding IL23.

[0123] In another aspect, provided are pharmaceutical compositions comprising any of the above antibodies and a pharmaceutically acceptable carrier. Some such pharmaceutical compositions further comprise an antibody comprising an IL23 antigen-binding domain. In another aspect, provided are kits comprising any of the above antibodies or pharmaceutical compositions. In another aspect, provided is a vessel or delivery device comprising any of the above antibodies or pharmaceutical compositions. In another aspect, provided is a nucleic acid composition comprising a nucleic acid or a set of nucleic acids encoding any of the above antibodies. In another aspect, provided is an expression vector composition an expression vector or a set of expression vectors comprising the nucleic acid composition. In another aspect, provided is a host cell comprising the expression vector composition. In another aspect, provided is a method of making an anti-TL1A antibody, comprising culturing the host cell under conditions wherein anti-TL1A antibody is expressed, and recovering the anti-TL1A antibody.

[0124] In another aspect, provided is a method of inhibiting or reducing TL1A-mediated activity in a subject in need thereof, comprising administering to the subject any of the above antibodies or pharmaceutical compositions. In another aspect, provided are any of the above antibodies or pharmaceutical compositions for use in inhibiting or reducing TL1A-mediated activity in a subject in need thereof. In another aspect, provided is use of any of the above antibodies or pharmaceutical compositions for inhibiting or reducing TL1A-mediated activity in a subject in need thereof. In another aspect, provided is use of any of the above antibodies or pharmaceutical compositions in the manufacture of a medicament for inhibiting or reducing TL1A-mediated activity in a subject in need thereof.

[0125] In another aspect, provided is a method of treating a TL1A-associated disease in a subject in need thereof, comprising administering to the subject any of the above antibodies or pharmaceutical compositions. In another aspect, provided are any of the above antibodies or pharmaceutical compositions for use in the treatment of a TL1A-associated disease in a subject in need thereof. In another aspect, provided is use of any of the above antibodies or pharmaceutical compositions for the treatment of a TL1A-associated disease in a subject in need thereof. In another aspect, provided is use of any of the above antibodies or pharmaceutical compositions in the manufacture of a medicament for the treatment of a TL1A-associated disease in a subject in need thereof. In some such methods, antibodies or pharmaceutical compositions for use, or uses, the TL1A-associated disease is an inflammatory disease, an autoimmune disease, or a fibrotic disease, optionally wherein the TL1A-associated disease is an inflammatory bowel disease. In some such methods, antibodies or pharmaceutical compositions for use, or uses, the subject is a human. In some such methods, antibodies or pharmaceutical compositions for use, or uses, the antibody comprising the TL1A-antigen binding domain is used in combination with an antibody comprising an IL23 antigen-binding domain. In some such methods, antibodies or pharmaceutical compositions for use, or uses, the antibody comprising the IL23 antigen-binding domain and the antibody comprising the TL1A antigen-binding domain are administered simultaneously. In some such methods, antibodies or pharmaceutical compositions for use, or uses, the antibody comprising the IL23 antigen-binding domain and the antibody comprising the TL1A antigen-binding domain are administered sequentially in any order.

[0126] In another aspect, provided are antibodies comprising an interleukin-23 (IL23) antigen-binding domain comprising a variable heavy domain and a variable light domain. In some such antibodies, the antibody comprises a variable heavy domain comprising a vhCDR1, a vhCDR2, and a vhCDR3 contained within a variable heavy domain comprising the amino acid sequence of any one of SEQ ID NOS: 2233, 2235, and 179, and a variable light domain comprising a vlCDR1, a vlCDR2, and a vlCDR3 contained within a variable light domain comprising the amino acid sequence of any one of SEQ ID NOS: 2234, 2237, and 1248. In some such antibodies, the antibody comprises a variable heavy domain comprising a vhCDR1, a vhCDR2, and a vhCDR3 contained within a variable heavy domain comprising the amino acid sequence of SEQ ID NO: 2233, and a variable light domain comprising a vlCDR1, a vlCDR2, and a vlCDR3 contained within a variable light domain comprising the amino acid sequence of SEQ ID NO: 2234. In some such antibodies, the antibody comprises a variable heavy domain comprising a vhCDR1, a vhCDR2, and a vhCDR3 contained within a variable heavy domain comprising the amino acid sequence of SEQ ID NO: 2235, and a variable light domain comprising a vlCDR1, a vlCDR2, and a vlCDR3 contained within a variable light domain comprising the amino acid sequence of SEQ ID NO: 2237. In some such antibodies, the antibody comprises a variable heavy domain comprising a vhCDR1, a vhCDR2, and a vhCDR3 contained within a variable heavy domain comprising the amino acid sequence of SEQ ID NO: 179, and a variable light domain comprising a vlCDR1, a vlCDR2, and a vlCDR3 contained within a variable light domain comprising the amino acid sequence of SEQ ID NO: 1248. In some such antibodies, the antibody comprises a variable heavy domain comprising a vhCDR1, a vhCDR2, and a vhCDR3 contained within a variable heavy domain comprising the amino acid sequence of SEQ ID NO: 2113, and a variable light domain comprising a vlCDR1, a vlCDR2, and a vlCDR3 contained within a variable light domain comprising the amino acid sequence of SEQ ID NO: 2231. In some such antibodies, the antibody comprises a variable heavy domain comprising a vhCDR1, a vhCDR2, and a vhCDR3 contained within a variable heavy domain comprising the amino acid sequence of SEQ ID NO: 1967, and a variable light domain comprising a vlCDR1, a vlCDR2, and a vlCDR3 contained within a variable light domain comprising the amino acid sequence of SEQ ID NO: 1248. In some such antibodies, the antibody comprises a variable heavy domain comprising a vhCDR1, a vhCDR2, and a vhCDR3 and a variable light domain comprising a vlCDR1, a vlCDR2, and a vlCDR3 contained within a variable heavy domain and variable light domain pair in XENP53412, XENP53413, XENP53369, XENP53375, XENP53387, XENP53415, XENP53370, XENP53371, XENP53376, XENP53377, XENP53378, XENP53379, XENP53380, or XENP53414. Optionally, the CDRs in any of the above antibodies are as defined by the Kabat, Chothia, Kabat+Chothia, AbM, contact, or IMGT definition.

[0127] In some such antibodies, the variable heavy domain comprises a vhCDR1 comprising the amino acid sequence of SEQ ID NO: 180, a vhCDR2 comprising the amino acid sequence of SEQ ID NO: 181, and a vhCDR3 comprising the amino acid sequence of SEQ ID NO: 182 or 2236, and the variable light domain comprises a vlCDR1 comprising the amino acid sequence of SEQ ID NO: 184, a vlCDR2 comprising the amino acid sequence of SEQ ID NO: 1249 or 2238, and a vlCDR3 comprising the amino acid sequence of SEQ ID NO: 1250. In some such antibodies, the variable heavy domain comprises a vhCDR1 comprising the amino acid sequence of SEQ ID NO: 180, a vhCDR2 comprising the amino acid sequence of SEQ ID NO: 181, and a vhCDR3 comprising the amino acid sequence of SEQ ID NO: 182, and the variable light domain comprises a vlCDR1 comprising the amino acid sequence of SEQ ID NO: 184, a vlCDR2 comprising the amino acid sequence of SEQ ID NO: 1249, and a vlCDR3 comprising the amino acid sequence of SEQ ID NO: 1250. In some such antibodies, the variable heavy domain comprises a vhCDR1 comprising the amino acid sequence of SEQ ID NO: 180, a vhCDR2 comprising the amino acid sequence of SEQ ID NO: 181, and a vhCDR3 comprising the amino acid sequence of SEQ ID NO: 2236, and the variable light domain comprises a vlCDR1 comprising the amino acid sequence of SEQ ID NO: 184, a vlCDR2 comprising the amino acid sequence of SEQ ID NO: 2238, and a vlCDR3 comprising the amino acid sequence of SEQ ID NO: 1250. In some such antibodies, the variable heavy domain comprises a vhCDR1 comprising the amino acid sequence of SEQ ID NO: 2239, a vhCDR2 comprising the amino acid sequence of SEQ ID NO: 181, and a vhCDR3 comprising the amino acid sequence of SEQ ID NO: 182, and the variable light domain comprises a vlCDR1 comprising the amino acid sequence of SEQ ID NO: 184, a vlCDR2 comprising the amino acid sequence of SEQ ID NO: 1249, and a vlCDR3 comprising the amino acid sequence of SEQ ID NO: 1250.

[0128] In some such antibodies, the variable heavy domain is at least 90%, at least 95%, at least 96%, at least 97%, at least 98%, or at least 99% identical to the amino acid sequence of any one of SEQ ID NOS: 2233, 2235, and 179, and the variable light domain is at least 90%, at least 95%, at least 96%, at least 97%, at least 98%, or at least 99% identical to the amino acid sequence of any one of SEQ ID NOS: 2234, 2237, and 1248. In some such antibodies, the variable heavy domain is at least 90%, at least 95%, at least 96%, at least 97%, at least 98%, or at least 99% identical to the amino acid sequence of SEQ ID NO: 2233, and the variable light domain is at least 90%, at least 95%, at least 96%, at least 97%, at least 98%, or at least 99% identical to the amino acid sequence of SEQ ID NO: 2234. In some such antibodies, the variable heavy domain is at least 90%, at least 95%, at least 96%, at least 97%, at least 98%, or at least 99% identical to the amino acid sequence of SEQ ID NO: 2235, and the variable light domain is at least 90%, at least 95%, at least 96%, at least 97%, at least 98%, or at least 99% identical to the amino acid sequence of SEQ ID NO: 2237. In some such antibodies, the variable heavy domain is at least 90%, at least 95%, at least 96%, at least 97%, at least 98%, or at least 99% identical to the amino acid sequence of SEQ ID NO: 179, and the variable light domain is at least 90%, at least 95%, at least 96%, at least 97%, at least 98%, or at least 99% identical to the amino acid sequence of SEQ ID NO: 1248. In some such antibodies, the variable heavy domain is at least 90%, at least 95%, at least 96%, at least 97%, at least 98%, or at least 99% identical to the amino acid sequence of SEQ ID NO: 2113, and the variable light domain is at least 90%, at least 95%, at least 96%, at least 97%, at least 98%, or at least 99% identical to the amino acid sequence of SEQ ID NO: 2231. In some such antibodies, the variable heavy domain is at least 90%, at least 95%, at least 96%, at least 97%, at least 98%, or at least 99% identical to the amino acid sequence of SEQ ID NO: 1967, and the variable light domain is at least 90%, at least 95%, at least 96%, at least 97%, at least 98%, or at least 99% identical to the amino acid sequence of SEQ ID NO: 1248. In some such antibodies, the variable heavy domain is at least 90%, at least 95%, at least 96%, at least 97%, at least 98%, or at least 99% identical to the amino acid sequence of any one of SEQ ID NOS: 1927-2132, and the variable light domain is at least 90%, at least 95%, at least 96%, at least 97%, at least 98%, or at least 99% identical to the amino acid sequence of any one of SEQ ID NOS: 2133-2232. In some such antibodies, the variable heavy domain and the variable light domain are at least 90%, at least 95%, at least 96%, at least 97%, at least 98%, or at least 99% identical to any pair of anti-IL23 variable heavy domain and variable light domain in XENP53412, XENP53413, XENP53369, XENP53375, XENP53387, XENP53415, XENP53370, XENP53371, XENP53376, XENP53377, XENP53378, XENP53379, XENP53380, or XENP53414. In some such antibodies, the variable heavy domain and the variable light domain are at least 90%, at least 95%, at least 96%, at least 97%, at least 98%, or at least 99% identical to any pair of anti-IL23 variable heavy domain and variable light domain in Table 29 or 33.

[0129] In some such antibodies, the variable heavy domain comprises the amino acid sequence of any one of SEQ ID NOS: 2233, 2235, and 179, and the variable light domain comprises the amino acid sequence of any one of SEQ ID NOS: 2234, 2237, and 1248. In some such antibodies, the variable heavy domain comprises the amino acid sequence of SEQ ID NO: 2233, and the variable light domain comprises the amino acid sequence of SEQ ID NO: 2234. In some such antibodies, the variable heavy domain comprises the amino acid sequence of SEQ ID NO: 2235, and the variable light domain comprises the amino acid sequence of SEQ ID NO: 2237. In some such antibodies, the variable heavy domain comprises the amino acid sequence of SEQ ID NO: 179, and the variable light domain comprises the amino acid sequence of SEQ ID NO: 1248. In some such antibodies, the variable heavy domain comprises the amino acid sequence of SEQ ID NO: 2113, and the variable light domain comprises the amino acid sequence of SEQ ID NO: 2231. In some such antibodies, the variable heavy domain comprises the amino acid sequence of SEQ ID NO: 1967, and the variable light domain comprises the amino acid sequence of SEQ ID NO: 1248. In some such antibodies, the variable heavy domain comprises the amino acid sequence of any one of SEQ ID NOS: 1927-2132, and the variable light domain comprises the amino acid sequence of any one of SEQ ID NOS: 2133-2232. In some such antibodies, the variable heavy domain and the variable light domain comprise any pair of anti-IL23 variable heavy domain and variable light domain in XENP53412, XENP53413, XENP53369, XENP53375, XENP53387, XENP53415, XENP53370, XENP53371, XENP53376, XENP53377, XENP53378, XENP53379, XENP53380, or XENP53414. In some such antibodies, the variable heavy domain comprises the amino acid sequence of any one of SEQ ID NOS: 1927-2132, and the variable light domain comprises the amino acid sequence of any one of SEQ ID NOS: 2133-2232. In some such antibodies, the variable heavy domain and the variable light domain comprise any pair of anti-IL23 variable heavy domain and variable light domain in Table 29 or 33. In some such antibodies, the variable heavy domain or the variable light domain can comprise variants of any of the above in which an N-terminal glutamine or glutamate is replaced with pyroglutamate.

[0130] In some such antibodies, (i) the variable heavy domain comprises a vhCDR1, a vhCDR2, and a vhCDR3 contained within a variable heavy domain comprising the amino acid sequence of any one of SEQ ID NOS: 2233, 2235, and 179, and (ii) the variable light domain comprises a vlCDR1, a vlCDR2, and a vlCDR3 contained within a variable light domain comprising the amino acid sequence of any one of SEQ ID NOS: 2234, 2237, and 1248, optionally wherein the CDRs are as defined by the Kabat, Chothia, Kabat+Chothia, AbM, contact, or IMGT definition. In some such antibodies, (i) the variable heavy domain comprises a vhCDR1 comprising the amino acid sequence of SEQ ID NO: 180, a vhCDR2 comprising the amino acid sequence of SEQ ID NO: 181, and a vhCDR3 comprising the amino acid sequence of SEQ ID NO: 182 or 2236, and (ii) the variable light domain comprises a vlCDR1 comprising the amino acid sequence of SEQ ID NO: 184, a vlCDR2 comprising the amino acid sequence of SEQ ID NO: 1249 or 2238, and a vlCDR3 comprising the amino acid sequence of SEQ ID NO: 1250. In some such antibodies, (i) the variable heavy domain comprises the amino acid sequence of any one of SEQ ID NOS: 2233, 2235, and 179, and (ii) the variable light domain comprises the amino acid sequence of any one of SEQ ID NOS: 2234, 2237, and 1248, or variants thereof in which an N-terminal glutamine or glutamate is replaced with pyroglutamate. In some such antibodies, the antibody specifically binds human TL23 with a K_{D} of less than about 1.1E-10 M as measured by surface plasmon resonance or Biacore at 25° C., optionally wherein the antibody specifically binds human TL23 with a K_{D} of less than about 6E-11 M, less than about 5.9E-11 M, less than about 5.8E-11 M, or less than about 5.7E-11 M. In some such antibodies, the antibody inhibits TL23 activity in an IL23 luciferase reporter assay with an IC₅₀ of less than about 65 pM, less than about 64 pM, or less than about 63 pM, optionally wherein the antibody inhibits IL23 activity with an IC₅₀ of less than about 60 pM, less than about 59 pM, less than about 58 pM, less than about 57 pM, or less than about 56 pM

[0131] In some such antibodies, (i) the variable heavy domain comprises a vhCDR1, a vhCDR2, and a vhCDR3 contained within a variable heavy domain comprising the amino acid sequence of SEQ ID NO: 2233, and (ii) the variable light domain comprises a vlCDR1, a vlCDR2, and a vlCDR3 contained within a variable light domain comprising the amino acid sequence of SEQ ID NO: 2234, optionally wherein the CDRs are as defined by the Kabat, Chothia, Kabat+Chothia, AbM, contact, or IMGT definition. In some such antibodies, (i) the variable heavy domain comprises a vhCDR1 comprising the amino acid sequence of SEQ ID NO: 180, a vhCDR2 comprising the amino acid sequence of SEQ ID NO: 181, and a vhCDR3 comprising the amino acid sequence of SEQ ID NO: 182, and (ii) the variable light domain comprises a vlCDR1 comprising the amino acid sequence of SEQ ID NO: 184, a vlCDR2 comprising the amino acid sequence of SEQ ID NO: 1249, and a vlCDR3 comprising the amino acid sequence of SEQ ID NO: 1250. In some such antibodies, (i) the variable heavy domain comprises the amino acid sequence of SEQ ID NO: 2233, and (ii) the variable light domain comprises the amino acid sequence of SEQ ID NO: 2234, or variants thereof in which an N-terminal glutamine or glutamate is replaced with pyroglutamate. In some such antibodies, the antibody specifically binds human TL23 with a K_{D} of less than about 1.1E-10 M as measured by surface plasmon resonance or Biacore at 25° C., optionally wherein the antibody specifically binds human IL23 with a K_{D} of less than about 6E-11 M, less than about 5.9E-11 M, less than about 5.8E-11 M, or less than about 5.7E-11 M. In some such antibodies, the antibody inhibits TL23 activity in an IL23 luciferase reporter assay with an IC₅₀ of less than about 65 pM, less than about 64 pM, or less than about 63 pM, optionally wherein the antibody inhibits IL23 activity with an IC₅₀ of less than about 60 pM, less than about 59 pM, less than about 58 pM, less than about 57 pM, or less than about 56 pM

[0132] In some such antibodies, (i) the variable heavy domain comprises a vhCDR1, a vhCDR2, and a vhCDR3 contained within a variable heavy domain comprising the amino acid sequence of SEQ ID NO: 2235, and (ii) the variable light domain comprises a vlCDR1, a vlCDR2, and a vlCDR3 contained within a variable light domain comprising the amino acid sequence of SEQ ID NO: 2237, optionally wherein the CDRs are as defined by the Kabat, Chothia, Kabat+Chothia, AbM, contact, or IMGT definition. In some such antibodies, (i) the variable heavy domain comprises a vhCDR1 comprising the amino acid sequence of SEQ ID NO: 180, a vhCDR2 comprising the amino acid sequence of SEQ ID NO: 181, and a vhCDR3 comprising the amino acid sequence of SEQ ID NO: 2236, and (ii) the variable light domain comprises a vlCDR1 comprising the amino acid sequence of SEQ ID NO: 184, a vlCDR2 comprising the amino acid sequence of SEQ ID NO: 2238, and a vlCDR3 comprising the amino acid sequence of SEQ ID NO: 1250. In some such antibodies, (i) the variable heavy domain comprises the amino acid sequence of SEQ ID NO: 2235, and (ii) the variable light domain comprises the amino acid sequence of SEQ ID NO: 2237, or variants thereof in which an N-terminal glutamine or glutamate is replaced with pyroglutamate.

[0133] In some such antibodies, (i) the variable heavy domain comprises a vhCDR1, a vhCDR2, and a vhCDR3 contained within a variable heavy domain comprising the amino acid sequence of SEQ ID NO: 179, and (ii) the variable light domain comprises a vlCDR1, a vlCDR2, and a vlCDR3 contained within a variable light domain comprising the amino acid sequence of SEQ ID NO: 1248, optionally wherein the CDRs are as defined by the Kabat, Chothia, Kabat+Chothia, AbM, contact, or IMGT definition. In some such antibodies, (i) the variable heavy domain comprises a vhCDR1 comprising the amino acid sequence of SEQ ID NO: 180, a vhCDR2 comprising the amino acid sequence of SEQ ID NO: 181, and a vhCDR3 comprising the amino acid sequence of SEQ ID NO: 182, and (ii) the variable light domain comprises a vlCDR1 comprising the amino acid sequence of SEQ ID NO: 184, a vlCDR2 comprising the amino acid sequence of SEQ ID NO: 1249, and a vlCDR3 comprising the amino acid sequence of SEQ ID NO: 1250. In some such antibodies, (i) the variable heavy domain comprises the amino acid sequence of SEQ ID NO: 179, and (ii) the variable light domain comprises the amino acid sequence of SEQ ID NO: 1248, or variants thereof in which an N-terminal glutamine or glutamate is replaced with pyroglutamate.

[0134] In some such antibodies, the antibody is a chimeric or humanized antibody. In some such antibodies, the antibody is an antigen-binding fragment of an intact antibody. In some such antibodies, the antibody comprises a heavy chain constant domain and a light chain constant domain. In some such antibodies, the heavy chain constant domain is of isotype IgG1.

[0135] In some such antibodies, the heavy chain constant domain comprise a set of heterodimerization skew variants. In some such antibodies, the heavy chain constant domain each comprise one or more ablation variants. In some such antibodies, the heavy chain constant domain comprises one or more pI variants. In some such antibodies, the heavy chain constant domain comprises amino acid substitutions E233P/L234V/L235A/G236del/S267K, wherein numbering is according to EU numbering. In some such antibodies, the heavy chain constant domain comprises amino acid substitutions M428L/N434S, wherein numbering is according to EU numbering. In some such antibodies, the heavy chain constant domain comprises amino acid substitutions E233P/L234V/L235A/G236del/S267K and M428L/N434S, wherein numbering is according to EU numbering. In some such antibodies, the heavy chain constant domain comprises amino acid substitutions L368D/K370S, wherein numbering is according to EU numbering. In some such antibodies, the heavy chain constant domain comprises amino acid substitutions N208D/Q295E/N384D/Q418E/N421D, wherein numbering is according to EU numbering. In some such antibodies, the heavy chain constant domain comprises amino acid substitutions E233P/L234V/L235A/G236del/S267K, M428L/N434S, L368D/K370S, and N208D/Q295E/N384D/Q418E/N421D, wherein numbering is according to EU numbering. In some such antibodies, the heavy chain constant domain comprises amino acid substitutions E357Q/S364K, wherein numbering is according to EU numbering. In some such antibodies, the heavy chain constant domain comprises amino acid substitutions E233P/L234V/L235A/G236del/S267K, M428L/N434S, and E357Q/S364K, wherein numbering is according to EU numbering. In some such antibodies, the variable heavy domain comprises amino acid substitution Q39E and the variable light domain comprises amino acid substitution Q38K, wherein numbering is according to Kabat numbering. In some such antibodies, the variable heavy domain comprises amino acid substitution Q39K and the variable light domain comprises amino acid substitution Q38E, wherein numbering is according to Kabat numbering. In some such antibodies, the heavy chain constant domain comprises amino acid substitution A141F and the light chain constant domain comprises amino acid substitution F118A, wherein numbering is according to EU numbering. In some such antibodies, the heavy chain constant domain comprises amino acid substitutions K213E/K218D and the light chain constant domain comprises amino acid substitutions D122K/E123K, wherein numbering is according to EU numbering. In some such antibodies, the variable heavy domain comprises amino acid substitution Q39E and the variable light domain comprises amino acid substitution Q38K according to Kabat numbering, and the heavy chain constant domain comprises amino acid substitutions K213E/K218D according to EU numbering and the light chain constant domain comprises amino acid substitutions D122K/E123K according to Kabat numbering. In some such antibodies, the variable heavy domain comprises amino acid substitution Q39K and the variable light domain comprises amino acid substitution Q38E according to Kabat numbering, and the heavy chain constant domain comprises amino acid substitution A141F according to EU numbering and the light chain constant domain comprises amino acid substitution F118A according to Kabat numbering. In some such antibodies, the variable heavy domain comprises amino acid substitution Q39E and the variable light domain comprises amino acid substitution Q38K according to Kabat numbering, and the heavy chain constant domain comprises amino acid substitutions E233P/L234V/L235A/G236del/S267K, M428L/N434S, L368D/K370S, N208D/Q295E/N384D/Q418E/N421D, and K213E/K218D according to EU numbering and the light chain constant domain comprises amino acid substitutions D122K/E123K according to Kabat numbering. In some such antibodies, the variable heavy domain comprises amino acid substitution Q39K and the variable light domain comprises amino acid substitution Q38E according to Kabat numbering, and the heavy chain constant domain comprises amino acid substitutions E233P/L234V/L235A/G236del/S267K, M428L/N434S, E357Q/S364K, and A141F according to EU numbering and the light chain constant domain comprises amino acid substitution F118A according to Kabat numbering. In some such antibodies, the heavy chain constant domain comprises amino acid substitutions E233P/L234V/L235A/G236del/S267K, M428L/N434S, E357Q/S364K, and K213E/K218D according to EU numbering and the light chain constant domain comprises amino acid substitutions D122K/E123K according to Kabat numbering.

[0136] In some such antibodies, the antibody comprises a heavy chain comprising the amino acid sequence of SEQ ID NO: 2244 or a variant thereof in which the N-terminal glutamine is replaced with pyroglutamate and/or the C-terminal lysine or the C-terminal lysine and glycine are removed, and a light chain comprising the amino acid sequence of SEQ ID NO: 2245. In some such antibodies, the antibody comprises a heavy chain comprising the amino acid sequence of SEQ ID NO: 2250 or a variant thereof in which the N-terminal glutamine is replaced with pyroglutamate and/or the C-terminal lysine or the C-terminal lysine and glycine are removed, and a light chain comprising the amino acid sequence of SEQ ID NO: 2251. In some such antibodies, the antibody comprises a heavy chain comprising the amino acid sequence of SEQ ID NO: 2266 or a variant thereof in which the N-terminal glutamine is replaced with pyroglutamate and/or the C-terminal lysine or the C-terminal lysine and glycine are removed, and a light chain comprising the amino acid sequence of SEQ ID NO: 2267. In some such antibodies, the antibody comprises a heavy chain at least 90%, at least 95%, at least 96%, at least 97%, at least 98%, or at least 99% identical to the amino acid sequence of SEQ ID NO: 2244, and a light chain at least 90%, at least 95%, at least 96%, at least 97%, at least 98%, or at least 99% identical to the amino acid sequence of SEQ ID NO: 2245. In some such antibodies, the antibody comprises a heavy chain at least 90%, at least 95%, at least 96%, at least 97%, at least 98%, or at least 99% identical to the amino acid sequence of SEQ ID NO: 2250, and a light chain at least 90%, at least 95%, at least 96%, at least 97%, at least 98%, or at least 99% identical to the amino acid sequence of SEQ ID NO: 2251. In some such antibodies, the antibody comprises a heavy chain is at least 90%, at least 95%, at least 96%, at least 97%, at least 98%, or at least 99% identical to the amino acid sequence of SEQ ID NO: 2266, and a light chain is at least 90%, at least 95%, at least 96%, at least 97%, at least 98%, or at least 99% identical to the amino acid sequence of SEQ ID NO: 2267.

[0137] In some such antibodies, the antibody specifically binds human IL23 with a K_{D} of less than about 1.1E-10 M as measured by surface plasmon resonance or Biacore at 25° C., optionally wherein the antibody specifically binds human IL23 with a K_{D} of less than about 6E-11 M, less than about 5.9E-11 M, less than about 5.8E-11 M, or less than about 5.7E-11 M. In some such antibodies, the antibody inhibits IL23 activity in an IL23 luciferase reporter assay with an IC₅₀ of less than about 65 pM, less than about 64 pM, or less than about 63 pM, optionally wherein the antibody inhibits TL23 activity with an IC₅₀ of less than about 60 pM, less than about 59 pM, less than about 58 pM, less than about 57 pM, or less than about 56 pM.

[0138] In some such antibodies, the antibody is a bispecific antibody or multispecific antibody. In some such antibodies, the bispecific antibody or multispecific antibody further comprises a TNF-like ligand 1A (TL1A) antigen-binding domain. In some such antibodies, the bispecific antibody or multispecific antibody further comprises a means for binding TL1A.

[0139] In another aspect, provided are pharmaceutical compositions comprising any of the above antibodies and a pharmaceutically acceptable carrier. Some such pharmaceutical compositions further comprise an antibody comprising an TL1A antigen-binding domain.

[0140] In another aspect, provided is a kit comprising any of the above antibodies or pharmaceutical compositions. In another aspect, provided is a vessel or delivery device comprising any of the above antibodies or pharmaceutical compositions. In another aspect, provided is a nucleic acid composition comprising a nucleic acid or a set of nucleic acids encoding any of the above antibodies. In another aspect, provided is an expression vector composition an expression vector or a set of expression vectors comprising the nucleic acid composition. In another aspect, provided is a host cell comprising the expression vector composition. In another aspect, provided is a method of making an anti-IL23 antibody, comprising culturing the host cell under conditions wherein anti-IL23 antibody is expressed, and recovering the anti-IL23 antibody.

[0141] In another aspect, provided is a method of inhibiting or reducing IL23-mediated activity in a subject in need thereof, comprising administering to the subject any of the above antibodies or pharmaceutical compositions. In another aspect, provided are of the above antibodies or pharmaceutical compositions for use in inhibiting or reducing TL23-mediated activity in a subject in need thereof. In another aspect, provided is use of any of the above antibodies or pharmaceutical compositions for inhibiting or reducing IL23-mediated activity in a subject in need thereof. In another aspect, provided is use of any of the above antibodies or pharmaceutical compositions in the manufacture of a medicament for inhibiting or reducing IL23-mediated activity in a subject in need thereof.

[0142] In another aspect, provided is a method of treating an IL23-associated disease in a subject in need thereof, comprising administering to the subject any of the above antibodies or pharmaceutical composition. In another aspect, provided are any of the above antibodies or pharmaceutical compositions for use in the treatment of an IL23-associated disease in a subject in need thereof. In another aspect, provided is use of any of the above antibodies or pharmaceutical compositions for the treatment of an IL23-associated disease in a subject in need thereof. In another aspect, provided is use of any of the above antibodies or pharmaceutical compositions in the manufacture of a medicament for the treatment of an IL23-associated disease in a subject in need thereof. In some such methods, antibodies or compositions for use, or uses, the IL23-associated disease is an inflammatory disease, an autoimmune disease, or a fibrotic disease, optionally wherein the IL23-associated disease is an inflammatory bowel disease. In some such methods, antibodies or compositions for use, or uses, the subject is a human. In some such methods, antibodies or compositions for use, or uses, the antibody comprising the IL23-antigen binding domain is used in combination with an antibody comprising an TL1A antigen-binding domain. In some such methods, antibodies or compositions for use, or uses, the antibody comprising the TL1A antigen-binding domain and the antibody comprising the IL23 antigen-binding domain are administered simultaneously. In some such methods, antibodies or compositions for use, or uses, the antibody comprising the TL1A antigen-binding domain and the antibody comprising the IL23 antigen-binding domain are administered sequentially in any order.

[0143] In another aspect, provided are combinations comprising: (a) a first antibody comprising a TNF-like ligand 1A (TL1A) antigen-binding domain comprising a variable heavy domain (VH1) and a variable light domain (VL1); and (b) a second antibody comprising an interleukin-23 (IL23) antigen-binding domain comprising a variable heavy domain (VH2) and a variable light domain (VL2).

[0144] In some such combinations, the VH1 and VL1 comprise a variable heavy domain comprising a vhCDR1, a vhCDR2, and a vhCDR3 and a variable light domain comprising a vlCDR1, a vlCDR2, and a vlCDR3 contained within any pair of anti-TL1A variable heavy domain and variable light domain in Table 44, optionally wherein the CDRs are as defined by the Kabat, Chothia, Kabat+Chothia, AbM, contact, or IMGT definition. In some such combinations, the VH1 and VL1 comprise a variable heavy domain comprising a vhCDR1, a vhCDR2, and a vhCDR3 and a variable light domain comprising a vlCDR1, a vlCDR2, and a vlCDR3 contained within any pair of anti-TL1A variable heavy domain and variable light domain in Tables 7-10, 22, 23, 26, 29-34, and 48, optionally wherein the CDRs are as defined by the Kabat, Chothia, Kabat+Chothia, AbM, contact, or IMGT definition. In some such combinations, the VH1 and VL1 comprise a variable heavy domain comprising a vhCDR1, a vhCDR2, and a vhCDR3 contained within a variable heavy domain comprising the amino acid sequence of any one of SEQ ID NOS: 1427-1823 and 2316-2330, and a variable light domain comprising a vlCDR1, a vlCDR2, and a vlCDR3 contained within a variable light domain comprising the amino acid sequence of any one of 1824-1923, optionally wherein the CDRs are as defined by the Kabat, Chothia, Kabat+Chothia, AbM, contact, or IMGT definition. In some such combinations, the VH1 and VL1 comprise any pair of anti-TL1A variable heavy domain and variable light domain in Table 44. In some such combinations, the VH1 and VL1 comprise any pair of anti-TL1A variable heavy domain and variable light domain in Tables 7-10, 22, 23, 26, 29-34, and 48. In some such combinations, the VH1 and VL1 comprise a variable heavy domain comprising the amino acid sequence of any one of SEQ ID NOS: 1427-1823 and 2316-2330, and a variable light domain comprising the amino acid sequence of any one of 1824-1923, or variants thereof in which an N-terminal glutamine or glutamate is replaced with pyroglutamate. In some such combinations, the VH2 and VL2 comprise a variable heavy domain comprising a vhCDR1, a vhCDR2, and a vhCDR3 and a variable light domain comprising a vlCDR1, a vlCDR2, and a vlCDR3 contained within any pair of anti-TL1A variable heavy domain and variable light domain in Table 44, optionally wherein the CDRs are as defined by the Kabat, Chothia, Kabat+Chothia, AbM, contact, or IMGT definition. In some such combinations, the VH2 and VL2 comprise a variable heavy domain comprising a vhCDR1, a vhCDR2, and a vhCDR3 and a variable light domain comprising a vlCDR1, a vlCDR2, and a vlCDR3 contained within any pair of anti-TL1A variable heavy domain and variable light domain in Tables 11, 24-26, 29-34, and 49, optionally wherein the CDRs are as defined by the Kabat, Chothia, Kabat+Chothia, AbM, contact, or IMGT definition. In some such combinations, the VH2 and VL2 comprise a variable heavy domain comprising a vhCDR1, a vhCDR2, and a vhCDR3 contained within a variable heavy domain comprising the amino acid sequence of any one of 1927-2132, and a variable light domain comprising a vlCDR1, a vlCDR2, and a vlCDR3 contained within a variable light domain comprising the amino acid sequence of any one of 2133-2232, optionally wherein the CDRs are as defined by the Kabat, Chothia, Kabat+Chothia, AbM, contact, or IMGT definition. In some such combinations, the VH2 and VL2 comprise any pair of anti-IL23 variable heavy domain and variable light domain in Table 44. In some such combinations, the VH2 and VL2 comprise any pair of anti-IL23 variable heavy domain and variable light domain in Tables 11, 24-26, 29-34, and 49. In some such combinations, the VH2 and VL2 comprise a variable heavy domain comprising the amino acid sequence of any one of 1927-2132, and a variable light domain comprising the amino acid sequence of any one of 2133-2232, or variants thereof in which an N-terminal glutamine or glutamate is replaced with pyroglutamate.

[0145] In some such combinations, the VH1 and VL1 comprise a variable heavy domain comprising a vhCDR1, a vhCDR2, and a vhCDR3 contained within a variable heavy domain comprising the amino acid sequence of any one of SEQ ID NOS: 2241, 2253, 2259, 1674, and 1200, and a variable light domain comprising a vlCDR1, a vlCDR2, and a vlCDR3 contained within a variable light domain comprising the amino acid sequence of any one of SEQ ID NOS: 2243 and 1204. In some such combinations, the VH1 and VL1 comprise a variable heavy domain comprising a vhCDR1, a vhCDR2, and a vhCDR3 contained within a variable heavy domain comprising the amino acid sequence of SEQ ID NO: 2241, and a variable light domain comprising a vlCDR1, a vlCDR2, and a vlCDR3 contained within a variable light domain comprising the amino acid sequence of SEQ ID NO: 2243. In some such combinations, the VH1 and VL1 comprise a variable heavy domain comprising a vhCDR1, a vhCDR2, and a vhCDR3 contained within a variable heavy domain comprising the amino acid sequence of SEQ ID NO: 2253, and a variable light domain comprising a vlCDR1, a vlCDR2, and a vlCDR3 contained within a variable light domain comprising the amino acid sequence of SEQ ID NO: 2243. In some such combinations, the VH1 and VL1 comprise a variable heavy domain comprising a vhCDR1, a vhCDR2, and a vhCDR3 contained within a variable heavy domain comprising the amino acid sequence of SEQ ID NO: 2259, and a variable light domain comprising a vlCDR1, a vlCDR2, and a vlCDR3 contained within a variable light domain comprising the amino acid sequence of SEQ ID NO: 2243. In some such combinations, the VH1 and VL1 comprise a variable heavy domain comprising a vhCDR1, a vhCDR2, and a vhCDR3 contained within a variable heavy domain comprising the amino acid sequence of SEQ ID NO: 1674, and a variable light domain comprising a vlCDR1, a vlCDR2, and a vlCDR3 contained within a variable light domain comprising the amino acid sequence of SEQ ID NO: 1204. In some such combinations, the VH1 and VL1 comprise a variable heavy domain comprising a vhCDR1, a vhCDR2, and a vhCDR3 contained within a variable heavy domain comprising the amino acid sequence of SEQ ID NO: 1200, and a variable light domain comprising a vlCDR1, a vlCDR2, and a vlCDR3 contained within a variable light domain comprising the amino acid sequence of SEQ ID NO: 1204. In some such combinations, the VH1 and VL1 comprise a variable heavy domain comprising a vhCDR1, a vhCDR2, and a vhCDR3 contained within a variable heavy domain comprising the amino acid sequence of any one of SEQ ID NOS: 1427-1823 and 2316-2330, and a variable light domain comprising a vlCDR1, a vlCDR2, and a vlCDR3 contained within a variable light domain comprising the amino acid sequence of any one of SEQ ID NOS: 1824-1923. In some such combinations, the VH1 and VL1 comprise a variable heavy domain comprising a vhCDR1, a vhCDR2, and a vhCDR3 contained within a variable heavy domain comprising the amino acid sequence of any one of SEQ ID NOS: 1674, 1200, 1661, and 2323, and a variable light domain comprising a vlCDR1, a vlCDR2, and a vlCDR3 contained within a variable light domain comprising the amino acid sequence of SEQ ID NO: 1204. In some such combinations, the VH1 and VL1 comprise a variable heavy domain comprising a vhCDR1, a vhCDR2, and a vhCDR3 contained within a variable heavy domain comprising the amino acid sequence of SEQ ID NO: 1661, and a variable light domain comprising a vlCDR1, a vlCDR2, and a vlCDR3 contained within a variable light domain comprising the amino acid sequence of SEQ ID NO: 1204. In some such combinations, the VH1 and VL1 comprise a variable heavy domain comprising a vhCDR1, a vhCDR2, and a vhCDR3 contained within a variable heavy domain comprising the amino acid sequence of SEQ ID NO: 2323, and a variable light domain comprising a vlCDR1, a vlCDR2, and a vlCDR3 contained within a variable light domain comprising the amino acid sequence of SEQ ID NO: 1204. In some such combinations, the VH1 and VL1 comprise a variable heavy domain comprising a vhCDR1, a vhCDR2, and a vhCDR3 contained within a variable heavy domain comprising the amino acid sequence of SEQ ID NO: 101, and a variable light domain comprising a vlCDR1, a vlCDR2, and a vlCDR3 contained within a variable light domain comprising the amino acid sequence of SEQ ID NO: 105. In some such combinations, the VH1 and VL1 comprise a variable heavy domain comprising a vhCDR1, a vhCDR2, and a vhCDR3 contained within a variable heavy domain comprising the amino acid sequence of SEQ ID NO: 109, and a variable light domain comprising a vlCDR1, a vlCDR2, and a vlCDR3 contained within a variable light domain comprising the amino acid sequence of SEQ ID NO: 113. In some such combinations, the VH1 and VL1 comprise a variable heavy domain comprising a vhCDR1, a vhCDR2, and a vhCDR3 contained within a variable heavy domain comprising the amino acid sequence of SEQ ID NO: 117, and a variable light domain comprising a vlCDR1, a vlCDR2, and a vlCDR3 contained within a variable light domain comprising the amino acid sequence of SEQ ID NO: 121. In some such combinations, the VH1 and VL1 comprise a variable heavy domain comprising a vhCDR1, a vhCDR2, and a vhCDR3 contained within a variable heavy domain comprising the amino acid sequence of SEQ ID NO: 125, and a variable light domain comprising a vlCDR1, a vlCDR2, and a vlCDR3 contained within a variable light domain comprising the amino acid sequence of SEQ ID NO: 129. In some such combinations, the VH1 and VL1 comprise a variable heavy domain comprising a vhCDR1, a vhCDR2, and a vhCDR3 contained within a variable heavy domain comprising the amino acid sequence of SEQ ID NO: 133, and a variable light domain comprising a vlCDR1, a vlCDR2, and a vlCDR3 contained within a variable light domain comprising the amino acid sequence of SEQ ID NO: 137. In some such combinations, the VH1 and VL1 comprise a variable heavy domain comprising a vhCDR1, a vhCDR2, and a vhCDR3 contained within a variable heavy domain comprising the amino acid sequence of SEQ ID NO: 141, and a variable light domain comprising a vlCDR1, a vlCDR2, and a vlCDR3 contained within a variable light domain comprising the amino acid sequence of SEQ ID NO: 145. In some such combinations, the VH1 and VL1 comprise a variable heavy domain comprising a vhCDR1, a vhCDR2, and a vhCDR3 contained within a variable heavy domain comprising the amino acid sequence of SEQ ID NO: 149, and a variable light domain comprising a vlCDR1, a vlCDR2, and a vlCDR3 contained within a variable light domain comprising the amino acid sequence of SEQ ID NO: 153. In some such combinations, the VH1 and VL1 comprise a variable heavy domain comprising a vhCDR1, a vhCDR2, and a vhCDR3 contained within a variable heavy domain comprising the amino acid sequence of SEQ ID NO: 157, and a variable light domain comprising a vlCDR1, a vlCDR2, and a vlCDR3 contained within a variable light domain comprising the amino acid sequence of SEQ ID NO: 159. In some such combinations, the VH1 and VL1 comprise a variable heavy domain comprising a vhCDR1, a vhCDR2, and a vhCDR3 contained within a variable heavy domain comprising the amino acid sequence of SEQ ID NO: 161, and a variable light domain comprising a vlCDR1, a vlCDR2, and a vlCDR3 contained within a variable light domain comprising the amino acid sequence of SEQ ID NO: 165. In some such combinations, the VH1 and VL1 comprise a variable heavy domain comprising a vhCDR1, a vhCDR2, and a vhCDR3 contained within a variable heavy domain comprising the amino acid sequence of SEQ ID NO: 169, and a variable light domain comprising a vlCDR1, a vlCDR2, and a vlCDR3 contained within a variable light domain comprising the amino acid sequence of SEQ ID NO: 173. In some such combinations, the VH1 and VL1 comprise a variable heavy domain comprising a vhCDR1, a vhCDR2, and a vhCDR3 and a variable light domain comprising a vlCDR1, a vlCDR2, and a vlCDR3 contained within any pair of anti-TL1A variable heavy domain and variable light domain in XENP53412, XENP53413, XENP53369, XENP53375, XENP53387, XENP53415, XENP53370, XENP53371, XENP53376, XENP53377, XENP53378, XENP53379, XENP53380, or XENP53414. In some such combinations, the VH1 and VL1 comprise a variable heavy domain comprising a vhCDR1, a vhCDR2, and a vhCDR3 and a variable light domain comprising a vlCDR1, a vlCDR2, and a vlCDR3 contained within any pair of anti-TL1A variable heavy domain and variable light domain in Tables 29 and 31-34. Optionally, the CDRs in any of the above antibodies are as defined by the Kabat, Chothia, Kabat+Chothia, AbM, contact, or IMGT definition.

[0146] In some such combinations, the VH1 and VL1 comprise a variable heavy domain comprising a vhCDR1 comprising the amino acid sequence of SEQ ID NO: 102 or 1201, a vhCDR2 comprising the amino acid sequence of SEQ ID NO: 1924 or 1202, and a vhCDR3 comprising the amino acid sequence of SEQ ID NO: 1203 or 104, and a variable light domain comprising a vlCDR1 comprising the amino acid sequence of SEQ ID NO: 106, a vlCDR2 comprising the amino acid sequence of SEQ ID NO: 107, and a vlCDR3 comprising the amino acid sequence of SEQ ID NO: 108. In some such combinations, the VH1 and VL1 comprise a variable heavy domain comprising a vhCDR1 comprising the amino acid sequence of SEQ ID NO: 102, a vhCDR2 comprising the amino acid sequence of SEQ ID NO: 1924, and a vhCDR3 comprising the amino acid sequence of SEQ ID NO: 1203, and a variable light domain comprising a vlCDR1 comprising the amino acid sequence of SEQ ID NO: 106, a vlCDR2 comprising the amino acid sequence of SEQ ID NO: 107, and a vlCDR3 comprising the amino acid sequence of SEQ ID NO: 108. In some such combinations, the VH1 and VL1 comprise a variable heavy domain comprising a vhCDR1 comprising the amino acid sequence of SEQ ID NO: 1201, a vhCDR2 comprising the amino acid sequence of SEQ ID NO: 1202, and a vhCDR3 comprising the amino acid sequence of SEQ ID NO: 1203, and a variable light domain comprising a vlCDR1 comprising the amino acid sequence of SEQ ID NO: 106, a vlCDR2 comprising the amino acid sequence of SEQ ID NO: 107, and a vlCDR3 comprising the amino acid sequence of SEQ ID NO: 108. In some such combinations, the VH1 and VL1 comprise a variable heavy domain comprising a vhCDR1 comprising the amino acid sequence of SEQ ID NO: 102, a vhCDR2 comprising the amino acid sequence of SEQ ID NO: 1924, and a vhCDR3 comprising the amino acid sequence of SEQ ID NO: 104, and a variable light domain comprising a vlCDR1 comprising the amino acid sequence of SEQ ID NO: 106, a vlCDR2 comprising the amino acid sequence of SEQ ID NO: 107, and a vlCDR3 comprising the amino acid sequence of SEQ ID NO: 108. In some such combinations, the VH1 and VL1 comprise a variable heavy domain comprising a vhCDR1 comprising the amino acid sequence of SEQ ID NO: 102, a vhCDR2 comprising the amino acid sequence of SEQ ID NO: 1926, and a vhCDR3 comprising the amino acid sequence of SEQ ID NO: 104, and a variable light domain comprising a vlCDR1 comprising the amino acid sequence of SEQ ID NO: 106, a vlCDR2 comprising the amino acid sequence of SEQ ID NO: 107, and a vlCDR3 comprising the amino acid sequence of SEQ ID NO: 108. In some such combinations, the VH1 and VL1 comprise a variable heavy domain comprising a vhCDR1 comprising the amino acid sequence of SEQ ID NO: 102, a vhCDR2 comprising the amino acid sequence of SEQ ID NO: 103, and a vhCDR3 comprising the amino acid sequence of SEQ ID NO: 104, and a variable light domain comprising a vlCDR1 comprising the amino acid sequence of SEQ ID NO: 106, a vlCDR2 comprising the amino acid sequence of SEQ ID NO: 107, and a vlCDR3 comprising the amino acid sequence of SEQ ID NO: 108. In some such combinations, the VH1 and VL1 comprise a variable heavy domain comprising a vhCDR1 comprising the amino acid sequence of SEQ ID NO: 110, a vhCDR2 comprising the amino acid sequence of SEQ ID NO: 111, and a vhCDR3 comprising the amino acid sequence of SEQ ID NO: 112, and a variable light domain comprising a vlCDR1 comprising the amino acid sequence of SEQ ID NO: 114, a vlCDR2 comprising the amino acid sequence of SEQ ID NO: 115, and a vlCDR3 comprising the amino acid sequence of SEQ ID NO: 116. In some such combinations, the VH1 and VL1 comprise a variable heavy domain comprising a vhCDR1 comprising the amino acid sequence of SEQ ID NO: 118, a vhCDR2 comprising the amino acid sequence of SEQ ID NO: 119, and a vhCDR3 comprising the amino acid sequence of SEQ ID NO: 120, and a variable light domain comprising a vlCDR1 comprising the amino acid sequence of SEQ ID NO: 122, a vlCDR2 comprising the amino acid sequence of SEQ ID NO: 123, and a vlCDR3 comprising the amino acid sequence of SEQ ID NO: 124. In some such combinations, the VH1 and VL1 comprise a variable heavy domain comprising a vhCDR1 comprising the amino acid sequence of SEQ ID NO: 126, a vhCDR2 comprising the amino acid sequence of SEQ ID NO: 127, and a vhCDR3 comprising the amino acid sequence of SEQ ID NO: 128, and a variable light domain comprising a vlCDR1 comprising the amino acid sequence of SEQ ID NO: 130, a vlCDR2 comprising the amino acid sequence of SEQ ID NO: 131, and a vlCDR3 comprising the amino acid sequence of the amino acid sequence of SEQ ID NO: 132. In some such combinations, the VH1 and VL1 comprise a variable heavy domain comprising a vhCDR1 comprising the amino acid sequence of SEQ ID NO: 134, a vhCDR2 comprising the amino acid sequence of SEQ ID NO: 135, and a vhCDR3 comprising the amino acid sequence of SEQ ID NO: 136, and a variable light domain comprising a vlCDR1 comprising the amino acid sequence of SEQ ID NO: 138, a vlCDR2 comprising the amino acid sequence of SEQ ID NO: 139, and a vlCDR3 comprising the amino acid sequence of the amino acid sequence of SEQ ID NO: 140. In some such combinations, the VH1 and VL1 comprise a variable heavy domain comprising a vhCDR1 comprising the amino acid sequence of SEQ ID NO: 142, a vhCDR2 comprising the amino acid sequence of SEQ ID NO: 143, and a vhCDR3 comprising the amino acid sequence of SEQ ID NO: 144, and a variable light domain comprising a vlCDR1 comprising the amino acid sequence of SEQ ID NO: 146, a vlCDR2 comprising the amino acid sequence of SEQ ID NO: 147, and a vlCDR3 comprising the amino acid sequence of SEQ ID NO: 148. In some such combinations, the VH1 and VL1 comprise a variable heavy domain comprising a vhCDR1 comprising the amino acid sequence of SEQ ID NO: 150, a vhCDR2 comprising the amino acid sequence of SEQ ID NO: 151, and a vhCDR3 comprising the amino acid sequence of SEQ ID NO: 152, and a variable light domain comprising a vlCDR1 comprising the amino acid sequence of SEQ ID NO: 154, a vlCDR2 comprising the amino acid sequence of SEQ ID NO: 155, and a vlCDR3 comprising the amino acid sequence of SEQ ID NO: 156. In some such combinations, the VH1 and VL1 comprise a variable heavy domain comprising a vhCDR1 comprising the amino acid sequence of SEQ ID NO: 118, a vhCDR2 comprising the amino acid sequence of SEQ ID NO: 158, and a vhCDR3 comprising the amino acid sequence of SEQ ID NO: 120, and a variable light domain comprising a vlCDR1 comprising the amino acid sequence of SEQ ID NO: 122, a vlCDR2 comprising the amino acid sequence of SEQ ID NO: 123, and a vlCDR3 comprising the amino acid sequence of SEQ ID NO: 160. In some such combinations, the VH1 and VL1 comprise a variable heavy domain comprising a vhCDR1 comprising the amino acid sequence of SEQ ID NO: 162, a vhCDR2 comprising the amino acid sequence of SEQ ID NO: 163, and a vhCDR3 comprising the amino acid sequence of SEQ ID NO: 164, and a variable light domain comprising a vlCDR1 comprising the amino acid sequence of SEQ ID NO: 166, a vlCDR2 comprising the amino acid sequence of SEQ ID NO: 167, and a vlCDR3 comprising the amino acid sequence of SEQ ID NO: 168. In some such combinations, the VH1 and VL1 comprise a variable heavy domain comprising a vhCDR1 comprising the amino acid sequence of SEQ ID NO: 170, a vhCDR2 comprising the amino acid sequence of SEQ ID NO: 171, and a vhCDR3 comprising the amino acid sequence of SEQ ID NO: 172, and a variable light domain comprising a vlCDR1 comprising the amino acid sequence of SEQ ID NO: 174, a vlCDR2 comprising the amino acid sequence of SEQ ID NO: 175, and a vlCDR3 comprising the amino acid sequence of SEQ ID NO: 176.

[0147] In some such combinations, the VH1 is at least 90%, at least 95%, at least 96%, at least 97%, at least 98%, or at least 99% identical to the amino acid sequence of any one of SEQ ID NOS: 2241, 2253, 2259, 1674, and 1200, and the VL1 is at least 90%, at least 95%, at least 96%, at least 97%, at least 98%, or at least 99% identical to the amino acid sequence of any one of SEQ ID NOS: 2243 and 1204. In some such combinations, the VH1 is at least 90%, at least 95%, at least 96%, at least 97%, at least 98%, or at least 99% identical to the amino acid sequence of SEQ ID NO: 2241, and the VL1 is at least 90%, at least 95%, at least 96%, at least 97%, at least 98%, or at least 99% identical to the amino acid sequence of SEQ ID NO: 2243. In some such combinations, the VH1 is at least 90%, at least 95%, at least 96%, at least 97%, at least 98%, or at least 99% identical to the amino acid sequence of SEQ ID NO: 2253, and the VL1 is at least 90%, at least 95%, at least 96%, at least 97%, at least 98%, or at least 99% identical to the amino acid sequence of SEQ ID NO: 2243. In some such combinations, the VH1 is at least 90%, at least 95%, at least 96%, at least 97%, at least 98%, or at least 99% identical to the amino acid sequence of SEQ ID NO: 2259, and the VL1 is at least 90%, at least 95%, at least 96%, at least 97%, at least 98%, or at least 99% identical to the amino acid sequence of SEQ ID NO: 2243. In some such combinations, the VH1 is at least 90%, at least 95%, at least 96%, at least 97%, at least 98%, or at least 99% identical to the amino acid sequence of SEQ ID NO: 1674, and the VL1 is at least 90%, at least 95%, at least 96%, at least 97%, at least 98%, or at least 99% identical to the amino acid sequence of SEQ ID NO: 1204. In some such combinations, the VH1 is at least 90%, at least 95%, at least 96%, at least 97%, at least 98%, or at least 99% identical to the amino acid sequence of SEQ ID NO: 1200, and the VL1 is at least 90%, at least 95%, at least 96%, at least 97%, at least 98%, or at least 99% identical to the amino acid sequence of SEQ ID NO: 1204. In some such combinations, the VH1 is at least 90%, at least 95%, at least 96%, at least 97%, at least 98%, or at least 99% identical to the amino acid sequence of any one of SEQ ID NOS: 1427-1823 and 2316-2330, and the VL1 is at least 90%, at least 95%, at least 96%, at least 97%, at least 98%, or at least 99% identical to the amino acid sequence of any one of SEQ ID NOS: 1824-1923. In some such combinations, the VH1 is at least 90%, at least 95%, at least 96%, at least 97%, at least 98%, or at least 99% identical to the amino acid sequence of any one of SEQ ID NOS: 1674, 1200, 1661, and 2323, and the VL1 is at least 90%, at least 95%, at least 96%, at least 97%, at least 98%, or at least 99% identical to the amino acid sequence of SEQ ID NO: 1204. In some such combinations, the VH1 is at least 90%, at least 95%, at least 96%, at least 97%, at least 98%, or at least 99% identical to the amino acid sequence of SEQ ID NO: 1661, and the VL1 is at least 90%, at least 95%, at least 96%, at least 97%, at least 98%, or at least 99% identical to the amino acid sequence of SEQ ID NO: 1204. In some such combinations, the VH1 is at least 90%, at least 95%, at least 96%, at least 97%, at least 98%, or at least 99% identical to the amino acid sequence of SEQ ID NO: 2323, and the VL1 is at least 90%, at least 95%, at least 96%, at least 97%, at least 98%, or at least 99% identical to the amino acid sequence of SEQ ID NO: 1204. In some such combinations, the VH1 is at least 90%, at least 95%, at least 96%, at least 97%, at least 98%, or at least 99% identical to the amino acid sequence of SEQ ID NO: 101, and the VL1 is at least 90%, at least 95%, at least 96%, at least 97%, at least 98%, or at least 99% identical to the amino acid sequence of SEQ ID NO: 105. In some such combinations, the VH1 is at least 90%, at least 95%, at least 96%, at least 97%, at least 98%, or at least 99% identical to the amino acid sequence of SEQ ID NO: 109, and the VL1 is at least 90%, at least 95%, at least 96%, at least 97%, at least 98%, or at least 99% identical to the amino acid sequence of SEQ ID NO: 113. In some such combinations, the VH1 is at least 90%, at least 95%, at least 96%, at least 97%, at least 98%, or at least 99% identical to the amino acid sequence of SEQ ID NO: 117, and the VL1 is at least 90%, at least 95%, at least 96%, at least 97%, at least 98%, or at least 99% identical to the amino acid sequence of SEQ ID NO: 121. In some such combinations, the VH1 is at least 90%, at least 95%, at least 96%, at least 97%, at least 98%, or at least 99% identical to the amino acid sequence of SEQ ID NO: 125, and the VL1 is at least 90%, at least 95%, at least 96%, at least 97%, at least 98%, or at least 99% identical to the amino acid sequence of SEQ ID NO: 129. In some such combinations, the VH1 is at least 90%, at least 95%, at least 96%, at least 97%, at least 98%, or at least 99% identical to the amino acid sequence SEQ ID NO: 133, and the VL1 is at least 90%, at least 95%, at least 96%, at least 97%, at least 98%, or at least 99% identical to the amino acid sequence of SEQ ID NO: 137. In some such combinations, the VH1 is at least 90%, at least 95%, at least 96%, at least 97%, at least 98%, or at least 99% identical to the amino acid sequence of SEQ ID NO: 141, and the VL1 is at least 90%, at least 95%, at least 96%, at least 97%, at least 98%, or at least 99% identical to the amino acid sequence of SEQ ID NO: 145. In some such combinations, the VH1 is at least 90%, at least 95%, at least 96%, at least 97%, at least 98%, or at least 99% identical to the amino acid sequence of SEQ ID NO: 149, and the VL1 is at least 90%, at least 95%, at least 96%, at least 97%, at least 98%, or at least 99% identical to the amino acid sequence of SEQ ID NO: 153. In some such combinations, the VH1 is at least 90%, at least 95%, at least 96%, at least 97%, at least 98%, or at least 99% identical to the amino acid sequence of SEQ ID NO: 157, and the VL1 is at least 90%, at least 95%, at least 96%, at least 97%, at least 98%, or at least 99% identical to the amino acid sequence of SEQ ID NO: 159. In some such combinations, the VH1 is at least 90%, at least 95%, at least 96%, at least 97%, at least 98%, or at least 99% identical to the amino acid sequence of SEQ ID NO: 161, and the VL1 is at least 90%, at least 95%, at least 96%, at least 97%, at least 98%, or at least 99% identical to the amino acid sequence of SEQ ID NO: 165. In some such combinations, the VH1 is at least 90%, at least 95%, at least 96%, at least 97%, at least 98%, or at least 99% identical to the amino acid sequence of SEQ ID NO: 169, and the VL1 is at least 90%, at least 95%, at least 96%, at least 97%, at least 98%, or at least 99% identical to the amino acid sequence of SEQ ID NO: 173. In some such combinations, the VH1 and the VL1 are at least 90%, at least 95%, at least 96%, at least 97%, at least 98%, or at least 99% identical to any pair of anti-TL1A variable heavy domain and variable light domain in XENP53412, XENP53413, XENP53369, XENP53375, XENP53387, XENP53415, XENP53370, XENP53371, XENP53376, XENP53377, XENP53378, XENP53379, XENP53380, or XENP53414. In some such combinations, the VH1 and the VL1 are at least 90%, at least 95%, at least 96%, at least 97%, at least 98%, or at least 99% identical to any pair of anti-TL1A variable heavy domain and variable light domain in Tables 29 and 31-34.

[0148] In some such combinations, the VH1 comprises the amino acid sequence of any one of SEQ ID NOS: 2241, 2253, 2259, 1674, and 1200, and the VL1 comprises the amino acid sequence of any one of SEQ ID NOS: 2243 and 1204. In some such combinations, the VH1 comprises the amino acid sequence of SEQ ID NO: 2241, and the VL1 comprises the amino acid sequence of SEQ ID NO: 2243. In some such combinations, the VH1 comprises the amino acid sequence of SEQ ID NO: 2253, and the VL1 comprises the amino acid sequence of SEQ ID NO: 2243. In some such combinations, the VH1 comprises the amino acid sequence of SEQ ID NO: 2259, and the VL1 comprises the amino acid sequence of SEQ ID NO: 2243. In some such combinations, the VH1 comprises the amino acid sequence of SEQ ID NO: 1674, and the VL1 comprises the amino acid sequence of SEQ ID NO: 1204. In some such combinations, the VH1 comprises the amino acid sequence of SEQ ID NO: 1200, and the VL1 comprises the amino acid sequence of SEQ ID NO: 1204. In some such combinations, the VH1 comprises the amino acid sequence of any one of SEQ ID NOS: 1427-1823 and 2316-2330, and the VL1 comprises the amino acid sequence of any one of SEQ ID NOS: 1824-1923. In some such combinations, the VH1 comprises the amino acid sequence of any one of SEQ ID NOS: 1674, 1200, 1661, and 2323, and the VL1 comprises the amino acid sequence of SEQ ID NO: 1204. In some such combinations, the VH1 comprises the amino acid sequence of SEQ ID NO: 1661, and the VL1 comprises the amino acid sequence of SEQ ID NO: 1204. In some such combinations, the VH1 comprises the amino acid sequence of SEQ ID NO: 2323, and the VL1 comprises the amino acid sequence of SEQ ID NO: 1204. In some such combinations, the VH1 comprises the amino acid sequence of SEQ ID NO: 101, and the VL1 comprises the amino acid sequence of SEQ ID NO: 105, optionally wherein the heavy chain comprises the amino acid sequence of SEQ ID NO: 1419 or a variant thereof in which the N-terminal glutamine is replaced with pyroglutamate and/or the C-terminal lysine or the C-terminal lysine and glycine are removed and the light chain comprises the amino acid sequence of SEQ ID NO: 1420. In some such combinations, the VH1 comprises the amino acid sequence of SEQ ID NO: 109, and the VL1 comprises the amino acid sequence of SEQ ID NO: 113. In some such combinations, the VH1 comprises the amino acid sequence of SEQ ID NO: 117, and the VL1 comprises the amino acid sequence of SEQ ID NO: 121. In some such combinations, the VH1 comprises the amino acid sequence of SEQ ID NO: 125, and the VL1 comprises the amino acid sequence of SEQ ID NO: 129. In some such combinations, the VH1 comprises the amino acid sequence of SEQ ID NO: 133, and the VL1 comprises the amino acid sequence of SEQ ID NO: 137. In some such combinations, the VH1 comprises the amino acid sequence of SEQ ID NO: 141, and the VL1 comprises the amino acid sequence of SEQ ID NO: 145. In some such combinations, the VH1 comprises the amino acid sequence of SEQ ID NO: 149, and the VL1 comprises the amino acid sequence of SEQ ID NO: 153. In some such combinations, the VH1 comprises the amino acid sequence of SEQ ID NO: 157, and the VL1 comprises the amino acid sequence of SEQ ID NO: 159. In some such combinations, the VH1 comprises the amino acid sequence of SEQ ID NO: 161, and the VL1 comprises the amino acid sequence of SEQ ID NO: 165. In some such combinations, the VH1 comprises the amino acid sequence of SEQ ID NO: 169, and the VL1 comprises the amino acid sequence of SEQ ID NO: 173. In some such combinations, the VH1 and the VL1 comprise any pair of anti-TL1A variable heavy domain and variable light domain in XENP53412, XENP53413, XENP53369, XENP53375, XENP53387, XENP53415, XENP53370, XENP53371, XENP53376, XENP53377, XENP53378, XENP53379, XENP53380, or XENP53414. In some such combinations, the VH1 and the VL1 comprise any pair of anti-TL1A variable heavy domain and variable light domain in Tables 29 and 31-34. In some such combinations, the VH1 or VL1 can comprise variants of any of the above in which an N-terminal glutamine or glutamate is replaced with pyroglutamate.

[0149] In some such combinations, the VH2 and VL2 comprise a variable heavy domain comprising a vhCDR1, a vhCDR2, and a vhCDR3 contained within a variable heavy domain comprising the amino acid sequence of any one of SEQ ID NOS: 2233, 2235, and 179, and a variable light domain comprising a vlCDR1, a vlCDR2, and a vlCDR3 contained within a variable light domain comprising the amino acid sequence of any one of SEQ ID NOS: 2234, 2237, and 1248. In some such combinations, the VH2 and VL2 comprise a variable heavy domain comprising a vhCDR1, a vhCDR2, and a vhCDR3 contained within a variable heavy domain comprising the amino acid sequence of SEQ ID NO: 2233, and a variable light domain comprising a vlCDR1, a vlCDR2, and a vlCDR3 contained within a variable light domain comprising the amino acid sequence of SEQ ID NO: 2234. In some such combinations, the VH2 and VL2 comprise a variable heavy domain comprising a vhCDR1, a vhCDR2, and a vhCDR3 contained within a variable heavy domain comprising the amino acid sequence of SEQ ID NO: 2235, and a variable light domain comprising a vlCDR1, a vlCDR2, and a vlCDR3 contained within a variable light domain comprising the amino acid sequence of SEQ ID NO: 2237. In some such combinations, the VH2 and VL2 comprise a variable heavy domain comprising a vhCDR1, a vhCDR2, and a vhCDR3 contained within a variable heavy domain comprising the amino acid sequence of SEQ ID NO: 179, and a variable light domain comprising a vlCDR1, a vlCDR2, and a vlCDR3 contained within a variable light domain comprising the amino acid sequence of SEQ ID NO: 1248. In some such combinations, the VH2 and VL2 comprise a variable heavy domain comprising a vhCDR1, a vhCDR2, and a vhCDR3 contained within a variable heavy domain comprising the amino acid sequence of SEQ ID NO: 2113, and a variable light domain comprising a vlCDR1, a vlCDR2, and a vlCDR3 contained within a variable light domain comprising the amino acid sequence of SEQ ID NO: 2231. In some such combinations, the VH2 and VL2 comprise a variable heavy domain comprising a vhCDR1, a vhCDR2, and a vhCDR3 contained within a variable heavy domain comprising the amino acid sequence of SEQ ID NO: 1967, and a variable light domain comprising a vlCDR1, a vlCDR2, and a vlCDR3 contained within a variable light domain comprising the amino acid sequence of SEQ ID NO: 1248. In some such combinations, the VH2 and VL2 comprise a variable heavy domain comprising a vhCDR1, a vhCDR2, and a vhCDR3 and a variable light domain comprising a vlCDR1, a vlCDR2, and a vlCDR3 contained within a variable heavy domain and variable light domain pair in XENP53412, XENP53413, XENP53369, XENP53375, XENP53387, XENP53415, XENP53370, XENP53371, XENP53376, XENP53377, XENP53378, XENP53379, XENP53380, or XENP53414. Optionally, the CDRs in any of the above are as defined by the Kabat, Chothia, Kabat+Chothia, AbM, contact, or IMGT definition.

[0150] In some such combinations, the VH2 and VL2 comprise a variable heavy domain comprising a vhCDR1 comprising the amino acid sequence of SEQ ID NO: 180, a vhCDR2 comprising the amino acid sequence of SEQ ID NO: 181, and a vhCDR3 comprising the amino acid sequence of SEQ ID NO: 182 or 2236, and a variable light domain comprising a vlCDR1 comprising the amino acid sequence of SEQ ID NO: 184, a vlCDR2 comprising the amino acid sequence of SEQ ID NO: 1249 or 2238, and a vlCDR3 comprising the amino acid sequence of SEQ ID NO: 1250. In some such combinations, the VH2 and VL2 comprise a variable heavy domain comprising a vhCDR1 comprising the amino acid sequence of SEQ ID NO: 180, a vhCDR2 comprising the amino acid sequence of SEQ ID NO: 181, and a vhCDR3 comprising the amino acid sequence of SEQ ID NO: 182, and a variable light domain comprising a vlCDR1 comprising the amino acid sequence of SEQ ID NO: 184, a vlCDR2 comprising the amino acid sequence of SEQ ID NO: 1249, and a vlCDR3 comprising the amino acid sequence of SEQ ID NO: 1250. In some such combinations, the VH2 and VL2 comprise a variable heavy domain comprising a vhCDR1 comprising the amino acid sequence of SEQ ID NO: 180, a vhCDR2 comprising the amino acid sequence of SEQ ID NO: 181, and a vhCDR3 comprising the amino acid sequence of SEQ ID NO: 2236, and a variable light domain comprising a vlCDR1 comprising the amino acid sequence of SEQ ID NO: 184, a vlCDR2 comprising the amino acid sequence of SEQ ID NO: 2238, and a vlCDR3 comprising the amino acid sequence of SEQ ID NO: 1250. In some such combinations, the VH2 and VL2 comprise a variable heavy domain comprising a vhCDR1 comprising the amino acid sequence of SEQ ID NO: 2239, a vhCDR2 comprising the amino acid sequence of SEQ ID NO: 181, and a vhCDR3 comprising the amino acid sequence of SEQ ID NO: 182, and a variable light domain comprising a vlCDR1 comprising the amino acid sequence of SEQ ID NO: 184, a vlCDR2 comprising the amino acid sequence of SEQ ID NO: 1249, and a vlCDR3 comprising the amino acid sequence of SEQ ID NO: 1250.

[0151] In some such combinations, the VH2 is at least 90%, at least 95%, at least 96%, at least 97%, at least 98%, or at least 99% identical to the amino acid sequence of any one of SEQ ID NOS: 2233, 2235, and 179, and the VL2 is at least 90%, at least 95%, at least 96%, at least 97%, at least 98%, or at least 99% identical to the amino acid sequence of any one of SEQ ID NOS: 2234, 2237, and 1248. In some such combinations, the VH2 is at least 90%, at least 95%, at least 96%, at least 97%, at least 98%, or at least 99% identical to the amino acid sequence of SEQ ID NO: 2233, and the VL2 is at least 90%, at least 95%, at least 96%, at least 97%, at least 98%, or at least 99% identical to the amino acid sequence of SEQ ID NO: 2234. In some such combinations, the VH2 is at least 90%, at least 95%, at least 96%, at least 97%, at least 98%, or at least 99% identical to the amino acid sequence of SEQ ID NO: 2235, and the VL2 is at least 90%, at least 95%, at least 96%, at least 97%, at least 98%, or at least 99% identical to the amino acid sequence of SEQ ID NO: 2237. In some such combinations, the VH2 is at least 90%, at least 95%, at least 96%, at least 97%, at least 98%, or at least 99% identical to the amino acid sequence of SEQ ID NO: 179, and the VL2 is at least 90%, at least 95%, at least 96%, at least 97%, at least 98%, or at least 99% identical to the amino acid sequence of SEQ ID NO: 1248. In some such combinations, the VH2 is at least 90%, at least 95%, at least 96%, at least 97%, at least 98%, or at least 99% identical to the amino acid sequence of SEQ ID NO: 2113, and the VL2 is at least 90%, at least 95%, at least 96%, at least 97%, at least 98%, or at least 99% identical to the amino acid sequence of SEQ ID NO: 2231. In some such combinations, the VH2 is at least 90%, at least 95%, at least 96%, at least 97%, at least 98%, or at least 99% identical to the amino acid sequence of SEQ ID NO: 1967, and the VL2 is at least 90%, at least 95%, at least 96%, at least 97%, at least 98%, or at least 99% identical to the amino acid sequence of SEQ ID NO: 1248. In some such combinations, the VH2 is at least 90%, at least 95%, at least 96%, at least 97%, at least 98%, or at least 99% identical to the amino acid sequence of any one of SEQ ID NOS: 1927-2132, and the VL2 is at least 90%, at least 95%, at least 96%, at least 97%, at least 98%, or at least 99% identical to the amino acid sequence of any one of SEQ ID NOS: 2133-2232. In some such combinations, the VH2 and the VL2 are at least 90%, at least 95%, at least 96%, at least 97%, at least 98%, or at least 99% identical to any pair of anti-IL23 variable heavy domain and variable light domain in XENP53412, XENP53413, XENP53369, XENP53375, XENP53387, XENP53415, XENP53370, XENP53371, XENP53376, XENP53377, XENP53378, XENP53379, XENP53380, or XENP53414. In some such combinations, the VH2 and the VL2 are at least 90%, at least 95%, at least 96%, at least 97%, at least 98%, or at least 99% identical to any pair of anti-IL23 variable heavy domain and variable light domain in Table 29 or 33.

[0152] In some such combinations, the VH2 comprises the amino acid sequence of any one of SEQ ID NOS: 2233, 2235, and 179, and the VL2 comprises the amino acid sequence of any one of SEQ ID NOS: 2234, 2237, and 1248. In some such combinations, the VH2 comprises the amino acid sequence of SEQ ID NO: 2233, and the VL2 comprises the amino acid sequence of SEQ ID NO: 2234. In some such combinations, the VH2 comprises the amino acid sequence of SEQ ID NO: 2235, and the VL2 comprises the amino acid sequence of SEQ ID NO: 2237. In some such combinations, the VH2 comprises the amino acid sequence of SEQ ID NO: 179, and the VL2 comprises the amino acid sequence of SEQ ID NO: 1248. In some such combinations, the VH2 comprises the amino acid sequence of SEQ ID NO: 2113, and the VL2 comprises the amino acid sequence of SEQ ID NO: 2231. In some such combinations, the VH2 comprises the amino acid sequence of SEQ ID NO: 1967, and the VL2 comprises the amino acid sequence of SEQ ID NO: 1248. In some such combinations, the VH2 comprises the amino acid sequence of any one of SEQ ID NOS: 1927-2132, and the VL2 comprises the amino acid sequence of any one of SEQ ID NOS: 2133-2232. In some such combinations, the VH2 and the VL2 comprise any pair of anti-IL23 variable heavy domain and variable light domain in XENP53412, XENP53413, XENP53369, XENP53375, XENP53387, XENP53415, XENP53370, XENP53371, XENP53376, XENP53377, XENP53378, XENP53379, XENP53380, or XENP53414. In some such combinations, the VH2 and the VL2 comprise any pair of anti-IL23 variable heavy domain and variable light domain in Table 29 or 33. In some such combinations, the VH2 or VL2 can comprise variants of any of the above in which an N-terminal glutamine or glutamate is replaced with pyroglutamate.

[0153] In some such combinations, (i) the VH1 comprises a vhCDR1, a vhCDR2, and a vhCDR3 contained within a variable heavy domain comprising the amino acid sequence of any one of SEQ ID NOS: 2241, 2253, 2259, 1674, and 1200, (ii) the VL1 comprises a vlCDR1, a vlCDR2, and a vlCDR3 contained within a variable light domain comprising the amino acid sequence of any one of SEQ ID NOS: 2243 and 1204, (iii) the VH2 comprises a vhCDR1, a vhCDR2, and a vhCDR3 contained within a variable heavy domain comprising the amino acid sequence of any one of SEQ ID NOS: 2233, 2235, and 179, and (iv) the VL2 comprises a vlCDR1, a vlCDR2, and a vlCDR3 contained within a variable light domain comprising the amino acid sequence of any one of SEQ ID NOS: 2234, 2237, and 1248, optionally wherein the CDRs are as defined by the Kabat, Chothia, Kabat+Chothia, AbM, contact, or IMGT definition. In some such combinations, (i) the VH1 comprises a vhCDR1 comprising the amino acid sequence of SEQ ID NO: 102 or 1201, a vhCDR2 comprising the amino acid sequence of SEQ ID NO: 1924 or 1202, and a vhCDR3 comprising the amino acid sequence of SEQ ID NO: 1203 or 104, (ii) the VL1 comprises a vlCDR1 comprising the amino acid sequence of SEQ ID NO: 106, a vlCDR2 comprising the amino acid sequence of SEQ ID NO: 107, and a vlCDR3 comprising the amino acid sequence of SEQ ID NO: 108, (iii) the VH2 comprises a vhCDR1 comprising the amino acid sequence of SEQ ID NO: 180, a vhCDR2 comprising the amino acid sequence of SEQ ID NO: 181, and a vhCDR3 comprising the amino acid sequence of SEQ ID NO: 182 or 2236, and (iv) the VL2 comprises a vlCDR1 comprising the amino acid sequence of SEQ ID NO: 184, a vlCDR2 comprising the amino acid sequence of SEQ ID NO: 1249 or 2238, and a vlCDR3 comprising the amino acid sequence of SEQ ID NO: 1250. In some such combinations, (i) the VH1 comprises the amino acid sequence of any one of SEQ ID NOS: 2241, 2253, 2259, 1674, and 1200, (ii) the VL1 comprises the amino acid sequence of any one of SEQ ID NOS: 2243 and 1204, (iii) the VH2 comprises the amino acid sequence of any one of SEQ ID NOS: 2233, 2235, and 179, and (iv) the VL2 comprises the amino acid sequence of any one of SEQ ID NOS: 2234, 2237, and 1248, or variants thereof in which an N-terminal glutamine or glutamate is replaced with pyroglutamate.

[0154] In some such combinations, (i) the VH1 comprises a vhCDR1, a vhCDR2, and a vhCDR3 contained within a variable heavy domain comprising the amino acid sequence of SEQ ID NO: 2241, (ii) the VL1 comprises a vlCDR1, a vlCDR2, and a vlCDR3 contained within a variable light domain comprising the amino acid sequence of SEQ ID NO: 2243, (iii) the VH2 comprises a vhCDR1, a vhCDR2, and a vhCDR3 contained within a variable heavy domain comprising the amino acid sequence of SEQ ID NO: 2233, and (iv) the VL2 comprises a vlCDR1, a vlCDR2, and a vlCDR3 contained within a variable light domain comprising the amino acid sequence of SEQ ID NO: 2234, optionally wherein the CDRs are as defined by the Kabat, Chothia, Kabat+Chothia, AbM, contact, or IMGT definition. In some such combinations, (i) the VH1 comprises a vhCDR1 comprising the amino acid sequence of SEQ ID NO: 102, a vhCDR2 comprising the amino acid sequence of SEQ ID NO: 1924, and a vhCDR3 comprising the amino acid sequence of SEQ ID NO: 1203, (ii) the VL1 comprises a vlCDR1 comprising the amino acid sequence of SEQ ID NO: 106, a vlCDR2 comprising the amino acid sequence of SEQ ID NO: 107, and a vlCDR3 comprising the amino acid sequence of SEQ ID NO: 108, (iii) the VH2 comprises a vhCDR1 comprising the amino acid sequence of SEQ ID NO: 180, a vhCDR2 comprising the amino acid sequence of SEQ ID NO: 181, and a vhCDR3 comprising the amino acid sequence of SEQ ID NO: 182, and (iv) the VL2 comprises a vlCDR1 comprising the amino acid sequence of SEQ ID NO: 184, a vlCDR2 comprising the amino acid sequence of SEQ ID NO: 1249, and a vlCDR3 comprising the amino acid sequence of SEQ ID NO: 1250. In some such combinations, (i) the VH1 comprises the amino acid sequence of SEQ ID NO: 2241, (ii) the VL1 comprises the amino acid sequence of SEQ ID NO: 2243, (iii) the VH2 comprises the amino acid sequence of SEQ ID NO: 2233, and (iv) the VL2 comprises the amino acid sequence of SEQ ID NO: 2234, or variants thereof in which an N-terminal glutamine or glutamate is replaced with pyroglutamate.

[0155] In some such combinations, (i) the VH1 comprises a vhCDR1, a vhCDR2, and a vhCDR3 contained within a variable heavy domain comprising the amino acid sequence of SEQ ID NO: 2241, (ii) the VL1 comprises a vlCDR1, a vlCDR2, and a vlCDR3 contained within a variable light domain comprising the amino acid sequence of SEQ ID NO: 2243, (iii) the VH2 comprises a vhCDR1, a vhCDR2, and a vhCDR3 contained within a variable heavy domain comprising the amino acid sequence of SEQ ID NO: 2235, and (iv) the VL2 comprises a vlCDR1, a vlCDR2, and a vlCDR3 contained within a variable light domain comprising the amino acid sequence of SEQ ID NO: 2237. In some such combinations, (i) the VH1 comprises a vhCDR1 comprising the amino acid sequence of SEQ ID NO: 102, a vhCDR2 comprising the amino acid sequence of SEQ ID NO: 1924, and a vhCDR3 comprising the amino acid sequence of SEQ ID NO: 1203, (ii) the VL1 comprises a vlCDR1 comprising the amino acid sequence of SEQ ID NO: 106, a vlCDR2 comprising the amino acid sequence of SEQ ID NO: 107, and a vlCDR3 comprising the amino acid sequence of SEQ ID NO: 108, (iii) the VH2 comprises a vhCDR1 comprising the amino acid sequence of SEQ ID NO: 180, a vhCDR2 comprising the amino acid sequence of SEQ ID NO: 181, and a vhCDR3 comprising the amino acid sequence of SEQ ID NO: 2236, and (iv) the VL2 comprises a vlCDR1 comprising the amino acid sequence of SEQ ID NO: 184, a vlCDR2 comprising the amino acid sequence of SEQ ID NO: 2238, and a vlCDR3 comprising the amino acid sequence of SEQ ID NO: 1250. In some such combinations, (i) the VH1 comprises the amino acid sequence of SEQ ID NO: 2241, (ii) the VL1 comprises the amino acid sequence of SEQ ID NO: 2243, (iii) the VH2 comprises the amino acid sequence of SEQ ID NO: 2235, and (iv) the VL2 comprises the amino acid sequence of SEQ ID NO: 2237, or variants thereof in which an N-terminal glutamine or glutamate is replaced with pyroglutamate.

[0156] In some such combinations, (i) the VH1 comprises a vhCDR1, a vhCDR2, and a vhCDR3 contained within a variable heavy domain comprising the amino acid sequence of SEQ ID NO: 2253, (ii) the VL1 comprises a vlCDR1, a vlCDR2, and a vlCDR3 contained within a variable light domain comprising the amino acid sequence of SEQ ID NO: 2243, (iii) the VH2 comprises a vhCDR1, a vhCDR2, and a vhCDR3 contained within a variable heavy domain comprising the amino acid sequence of SEQ ID NO: 2233, and (iv) the VL2 comprises a vlCDR1, a vlCDR2, and a vlCDR3 contained within a variable light domain comprising the amino acid sequence of SEQ ID NO: 2234, optionally wherein the CDRs are as defined by the Kabat, Chothia, Kabat+Chothia, AbM, contact, or IMGT definition. In some such combinations, (i) the VH1 comprises a vhCDR1 comprising the amino acid sequence of SEQ ID NO: 1201, a vhCDR2 comprising the amino acid sequence of SEQ ID NO: 1202, and a vhCDR3 comprising the amino acid sequence of SEQ ID NO: 1203, (ii) the VL1 comprises a vlCDR1 comprising the amino acid sequence of SEQ ID NO: 106, a vlCDR2 comprising the amino acid sequence of SEQ ID NO: 107, and a vlCDR3 comprising the amino acid sequence of SEQ ID NO: 108, (iii) the VH2 comprises a vhCDR1 comprising the amino acid sequence of SEQ ID NO: 180, a vhCDR2 comprising the amino acid sequence of SEQ ID NO: 181, and a vhCDR3 comprising the amino acid sequence of SEQ ID NO: 182, and (iv) the VL2 comprises a vlCDR1 comprising the amino acid sequence of SEQ ID NO: 184, a vlCDR2 comprising the amino acid sequence of SEQ ID NO: 1249, and a vlCDR3 comprising the amino acid sequence of SEQ ID NO: 1250. In some such combinations, (i) the VH1 comprises the amino acid sequence of SEQ ID NO: 2253, (ii) the VL1 comprises the amino acid sequence of SEQ ID NO: 2243, (iii) the VH2 comprises the amino acid sequence of SEQ ID NO: 2233, and (iv) the VL2 comprises the amino acid sequence of SEQ ID NO: 2234, or variants thereof in which an N-terminal glutamine or glutamate is replaced with pyroglutamate.

[0157] In some such combinations, (i) the VH1 comprises a vhCDR1, a vhCDR2, and a vhCDR3 contained within a variable heavy domain comprising the amino acid sequence of SEQ ID NO: 2259, (ii) the VL1 comprises a vlCDR1, a vlCDR2, and a vlCDR3 contained within a variable light domain comprising the amino acid sequence of SEQ ID NO: 2243, (iii) the VH2 comprises a vhCDR1, a vhCDR2, and a vhCDR3 contained within a variable heavy domain comprising the amino acid sequence of SEQ ID NO: 2233, and (iv) the VL2 comprises a vlCDR1, a vlCDR2, and a vlCDR3 contained within a variable light domain comprising the amino acid sequence of SEQ ID NO: 2234, optionally wherein the CDRs are as defined by the Kabat, Chothia, Kabat+Chothia, AbM, contact, or IMGT definition. In some such combinations, (i) the VH1 comprises a vhCDR1 comprising the amino acid sequence of SEQ ID NO: 102, a vhCDR2 comprising the amino acid sequence of SEQ ID NO: 1924, and a vhCDR3 comprising the amino acid sequence of SEQ ID NO: 104, (ii) the VL1 comprises a vlCDR1 comprising the amino acid sequence of SEQ ID NO: 106, a vlCDR2 comprising the amino acid sequence of SEQ ID NO: 107, and a vlCDR3 comprising the amino acid sequence of SEQ ID NO: 108, (iii) the VH2 comprises a vhCDR1 comprising the amino acid sequence of SEQ ID NO: 180, a vhCDR2 comprising the amino acid sequence of SEQ ID NO: 181, and a vhCDR3 comprising the amino acid sequence of SEQ ID NO: 182, and (iv) the VL2 comprises a vlCDR1 comprising the amino acid sequence of SEQ ID NO: 184, a vlCDR2 comprising the amino acid sequence of SEQ ID NO: 1249, and a vlCDR3 comprising the amino acid sequence of SEQ ID NO: 1250. In some such combinations, (i) the VH1 comprises the amino acid sequence of SEQ ID NO: 2259, (ii) the VL1 comprises the amino acid sequence of SEQ ID NO: 2243, (iii) the VH2 comprises the amino acid sequence of SEQ ID NO: 2233, and (iv) the VL2 comprises the amino acid sequence of SEQ ID NO: 2234, or variants thereof in which an N-terminal glutamine or glutamate is replaced with pyroglutamate.

[0158] In some such combinations, (i) the VH1 comprises a vhCDR1, a vhCDR2, and a vhCDR3 contained within a variable heavy domain comprising the amino acid sequence of SEQ ID NO: 1674, (ii) the VL1 comprises a vlCDR1, a vlCDR2, and a vlCDR3 contained within a variable light domain comprising the amino acid sequence of SEQ ID NO: 1204, (iii) the VH2 comprises a vhCDR1, a vhCDR2, and a vhCDR3 contained within a variable heavy domain comprising the amino acid sequence of SEQ ID NO: 179, and (iv) the VL2 comprises a vlCDR1, a vlCDR2, and a vlCDR3 contained within a variable light domain comprising the amino acid sequence of SEQ ID NO: 1248, optionally wherein the CDRs are as defined by the Kabat, Chothia, Kabat+Chothia, AbM, contact, or IMGT definition. In some such combinations, (i) the VH1 comprises a vhCDR1 comprising the amino acid sequence of SEQ ID NO: 102, a vhCDR2 comprising the amino acid sequence of SEQ ID NO: 1924, and a vhCDR3 comprising the amino acid sequence of SEQ ID NO: 1203, (ii) the VL1 comprises a vlCDR1 comprising the amino acid sequence of SEQ ID NO: 106, a vlCDR2 comprising the amino acid sequence of SEQ ID NO: 107, and a vlCDR3 comprising the amino acid sequence of SEQ ID NO: 108, (iii) the VH2 comprises a vhCDR1 comprising the amino acid sequence of SEQ ID NO: 180, a vhCDR2 comprising the amino acid sequence of SEQ ID NO: 181, and a vhCDR3 comprising the amino acid sequence of SEQ ID NO: 182, and (iv) the VL2 comprises a vlCDR1 comprising the amino acid sequence of SEQ ID NO: 184, a vlCDR2 comprising the amino acid sequence of SEQ ID NO: 1249, and a vlCDR3 comprising the amino acid sequence of SEQ ID NO: 1250. In some such combinations, (i) the VH1 comprises the amino acid sequence of SEQ ID NO: 1674, (ii) the VL1 comprises the amino acid sequence of SEQ ID NO: 1204, (iii) the VH2 comprises the amino acid sequence of SEQ ID NO: 179, and (iv) the VL2 comprises the amino acid sequence of SEQ ID NO: 1248, or variants thereof in which an N-terminal glutamine or glutamate is replaced with pyroglutamate.

[0159] In some such combinations, (i) the VH1 comprises a vhCDR1, a vhCDR2, and a vhCDR3 contained within a variable heavy domain comprising the amino acid sequence of SEQ ID NO: 1200, (ii) the VL1 comprises a vlCDR1, a vlCDR2, and a vlCDR3 contained within a variable light domain comprising the amino acid sequence of SEQ ID NO: 1204, (iii) the VH2 comprises a vhCDR1, a vhCDR2, and a vhCDR3 contained within a variable heavy domain comprising the amino acid sequence of SEQ ID NO: 179, and (iv) the VL2 comprises a vlCDR1, a vlCDR2, and a vlCDR3 contained within a variable light domain comprising the amino acid sequence of SEQ ID NO: 1248, optionally wherein the CDRs are as defined by the Kabat, Chothia, Kabat+Chothia, AbM, contact, or IMGT definition. In some such combinations, (i) the VH1 comprises a vhCDR1 comprising the amino acid sequence of SEQ ID NO: 1201, a vhCDR2 comprising the amino acid sequence of SEQ ID NO: 1202, and a vhCDR3 comprising the amino acid sequence of SEQ ID NO: 1203, (ii) the VL1 comprises a vlCDR1 comprising the amino acid sequence of SEQ ID NO: 106, a vlCDR2 comprising the amino acid sequence of SEQ ID NO: 107, and a vlCDR3 comprising the amino acid sequence of SEQ ID NO: 108, (iii) the VH2 comprises a vhCDR1 comprising the amino acid sequence of SEQ ID NO: 180, a vhCDR2 comprising the amino acid sequence of SEQ ID NO: 181, and a vhCDR3 comprising the amino acid sequence of SEQ ID NO: 182, and (iv) the VL2 comprises a vlCDR1 comprising the amino acid sequence of SEQ ID NO: 184, a vlCDR2 comprising the amino acid sequence of SEQ ID NO: 1249, and a vlCDR3 comprising the amino acid sequence of SEQ ID NO: 1250. In some such combinations, (i) the VH1 comprises the amino acid sequence SEQ ID NO: 1200, (ii) the VL1 comprises the amino acid sequence of SEQ ID NO: 1204, (iii) the VH2 comprises the amino acid sequence of SEQ ID NO: 179, and (iv) the VL2 comprises the amino acid sequence of SEQ ID NO: 1248, or variants thereof in which an N-terminal glutamine or glutamate is replaced with pyroglutamate.

[0160] In some such combinations, the first antibody comprises (i) a first heavy chain comprising the VH1 and a first heavy chain constant domain, and (ii) a first light chain comprising the VL1 and a first light chain constant domain, and wherein the second antibody comprises (iii) a second heavy chain comprising the VH2 and a second heavy chain constant domain, and (iv) a second light chain comprising the VL2 and a second light chain constant domain. In some such combinations, the first heavy chain constant domain and the second heavy chain constant domain each comprise one or more ablation variants. In some such combinations, the first heavy chain constant domain or the second heavy chain constant domain comprises one or more pI variants. In some such combinations, the first heavy chain constant domain comprises amino acid substitutions E233P/L234V/L235A/G236del/S267K and/or the second heavy chain constant domain comprises amino acid substitutions E233P/L234V/L235A/G236del/S267K, wherein numbering is according to EU numbering. In some such combinations, the first heavy chain constant domain comprises amino acid substitutions M428L/N434S and/or the second heavy chain constant domain comprises amino acid substitutions M428L/N434S, wherein numbering is according to EU numbering. In some such combinations, the first heavy chain constant domain comprises amino acid substitutions E233P/L234V/L235A/G236del/S267K and M428L/N434S and/or the second heavy chain constant domain comprises amino acid substitutions E233P/L234V/L235A/G236del/S267K and M428L/N434S, wherein numbering is according to EU numbering.

[0161] In some such combinations, the first heavy chain constant domain is of isotype IgG1, and/or the second heavy chain constant domain is of isotype IgG1. In some such combinations, the first antibody is a chimeric or humanized antibody, and/or the second antibody is a chimeric or humanized antibody.

[0162] In some such combinations, the first antibody specifically binds human TL1A with a K_{D} of less than about 6.5E-11 M, less than about 6.4 E-11 M, or less than about 6.3E-11 as measured by surface plasmon resonance or Biacore at 25° C., optionally wherein the first antibody specifically binds human TL1A with a K_{D} of less than about 3E-11 M, less than about 2.9E-11 M, less than about 2.8E-11 M, or less than about 2.7E-11 M. In some such combinations, the first antibody inhibits TL1A activity in a TL1A luciferase reporter assay with an IC₅₀ of less than about 4.5 nM. In some such combinations, the second antibody specifically binds human IL23 with a K_{D} of less than about 1.1E-10 M as measured by surface plasmon resonance or Biacore at 25° C., optionally wherein the second antibody specifically binds human IL23 with a K_{D} of less than about 6E-11 M, less than about 5.9E-11 M, less than about 5.8E-11 M, or less than about 5.7E-11 M. In some such combinations, the second antibody inhibits IL23 activity in an IL23 luciferase reporter assay with an IC₅₀ of less than about 65 pM, less than about 64 pM, or less than about 63 pM, optionally wherein the second antibody inhibits IL23 activity with an IC₅₀ of less than about 60 pM, less than about 59 pM, less than about 58 pM, less than about 57 pM, or less than about 56 pM.

[0163] In another aspect, provided are pharmaceutical compositions comprising any of the above combinations and a pharmaceutically acceptable carrier. In another aspect, provided is a kit comprising the combination of any of the above combinations or pharmaceutical compositions. In another aspect, provided is a vessel or delivery device comprising any of the above combinations or pharmaceutical compositions. In another aspect, provided is a nucleic acid composition comprising a nucleic acid or a set of nucleic acids encoding any of the above combinations. In another aspect, provided is an expression vector composition comprising an expression vector or a set of expression vectors comprising the nucleic acid composition. In another aspect, provided is a method of inhibiting or reducing TL1A-mediated activity and/or IL23-mediated activity in a subject in need thereof, comprising administering to the subject the combination of any of the above combinations or pharmaceutical compositions. In another aspect, provided are any of the above combinations or pharmaceutical compositions for use in inhibiting or reducing TL1A-mediated activity and/or IL23-mediated activity in a subject in need thereof. In another aspect, provided is use of any of the above combinations or pharmaceutical compositions for inhibiting or reducing TL1A-mediated activity and/or IL23-mediated activity in a subject in need thereof. In another aspect, provided is use of any of the above combinations or pharmaceutical compositions in the manufacture of a medicament for inhibiting or reducing TL1A-mediated activity and/or IL23-mediated activity in a subject in need thereof.

[0164] In another aspect, provided is a method of treating a TL1A-associated disease and/or IL23-associated disease in a subject in need thereof, comprising administering to the subject any of the above combinations or pharmaceutical compositions. In another aspect, provided are any of the above combinations or pharmaceutical compositions for use in the treatment of a TL1A-associated disease and/or IL23-associated disease in a subject in need thereof. In another aspect, provided is use of any of the above combinations or pharmaceutical compositions for the treatment of a TL1A-associated disease and/or IL23-associated disease in a subject in need thereof. In another aspect, provided is use of any of the above combinations or pharmaceutical compositions in the manufacture of a medicament for the treatment of a TL1A-associated disease and/or IL23-associated disease in a subject in need thereof. In some such methods, combinations or compositions for use, or uses, the TL1A-associated disease and/or IL23-associated disease is an inflammatory disease, an autoimmune disease, or a fibrotic disease, optionally wherein the TL1A-associated disease and/or IL23-associated disease is an inflammatory bowel disease. In some such methods, combinations or compositions for use, or uses, the subject is a human.

[0165] In another aspect, provided is a heterodimeric antibody comprising: (a) a first monomer comprising: (i) a single chain variable fragment (scFv); and (ii) a first Fc domain, wherein the scFv is covalently attached to the N-terminus of the first Fc domain using a domain linker; (b) a second monomer comprising, from N-terminal to C-terminal, a VH1-CH1-hinge-CH2-CH3, wherein VH1 is a first variable heavy domain and CH2-CH3 is a second Fc domain; and (c) a light chain comprising, from N-terminal to C-terminal, VL1-CL, wherein VL1 is a first variable light domain and CL is a constant light domain, wherein the scFv comprises a second VH domain (VH2), a scFv linker, and a second variable light domain (VL2), wherein the VH1 and the VL1 together form a first antigen-binding domain (ABD) and the VH2 and the VL2 together form a second ABD, and wherein one of the first ABD and second ABD is a TL1A binding domain and the other of the first ABD and second ABD is a IL23 binding domain.

[0166] In another aspect, provided is a heterodimeric antibody comprising: (a) a first monomer comprising a VH1-CH1-hinge-CH2-CH3, wherein VH1 is a first variable heavy domain and CH2-CH3 is a first Fc domain; (b) a second monomer comprising a VH2-CH1-hinge-CH2-CH3, wherein VH2 is a second variable heavy domain and CH2-CH3 is a second Fc domain; (c) a first common light chain comprising a VL-CL; and (d) a second common light chain comprising a VL-CL, wherein the VH1 and the VL of the first common light chain together form a first antigen-binding domain (ABD) and the VH2 and the VL of the second common light chain together form a second ABD.

[0167] In another aspect, provided is a heterodimeric antibody comprising: (a) a first monomer comprising: (i) a VH1-CH1-hinge-CH2-CH3, and (ii) a first scFv comprising a VH2-scFv linker-VL2, wherein the scFv is covalently attached to the CH3 of the first monomer by a linker; (b) a second monomer comprising: (i) a VH1-CH1-hinge-CH2-CH3, and (ii) a second scFv comprising a VH2-scFv linker-VL2, wherein the scFv is covalently attached to the CH3 of the second monomer by a linker; (c) a first light chain comprising a VL1-CL; and (d) a second light chain comprising a VL1-CL, wherein each of the VH1s of the first monomer and second monomer are a first variable heavy domain, each of the VL1s of the first monomer and second monomer are a first light domain, each of the VH2s are a second variable heavy domain, and each of the VL2s are a second variable light domain, where the VH1 of the first monomer and VL1 of the first light chain, and the VH1 of the second monomer and VL1 of the second light chain each form a first antigen-binding domain, and the VH2 and VL2 of the first and second scFvs each for a second antigen-binding domain, wherein the first ABDs or the second ABDs are TL1A binding domains and the other of the first ABDs and second ABDs are IL23 binding domains.

### BRIEF DESCRIPTION OF THE DRAWINGS

[0168] FIG. 1 panels A-R depict bispecific formats of the present invention. Panel A depicts the “1+1 Fab-scFv-Fc” format, with a first Fab arm binding a first antigen and a second scFv arm binding second antigen. The 1+1 Fab-scFv-Fc format comprises a first monomer comprising a first heavy chain variable region (VH1) covalently attached to the N-terminus of a first heterodimeric Fc backbone (optionally via a linker), a second monomer comprising a single-chain Fv covalently attached to the N-terminus of a second corresponding heterodimeric Fc backbone (optionally via a linker), and a third monomer comprising a light chain variable region covalently to a light chain constant domain, wherein the light chain variable region is complementary to the VH1. Panel B depicts the “2+1 Fab₂-scFv-Fc” format, with a first Fab arm and a second Fab-scFv arm, wherein the Fab binds a first antigen and the scFv binds second antigen. The 2+1 Fab₂-scFv-Fc format comprises a first monomer comprising a first heavy chain variable region (VH1) covalently attached to the N-terminus of a first heterodimeric Fc backbone (optionally via a linker), a second monomer comprising the VH1 covalently attached (optionally via a linker) to a single-chain Fv covalently attached (optionally via a linker) to the N-terminus of a second corresponding heterodimeric Fc backbone, and a third monomer comprising a light chain variable region covalently to a light chain constant domain, wherein the light chain variable region is complementary to the VH1. Panel C depicts the “1+1 Common Light Chain” or “1+1 CLC” format, with a first Fc comprising a first Fab arm binding a first antigen and a second Fc comprising a second Fab arm binding second antigen. The 1+1 CLC format comprises a first monomer comprising VH1-CH1-hinge-CH2-CH3, a second monomer comprising VH2-CH1-hinge-CH2-CH3, and a third monomer comprising VL-CL. The VL pairs with the VH1 to form a binding domain with a first antigen binding specificity; and the VL pairs with the VH2 to form a binding domain with a second antigen binding specificity. Panel D depicts the “2+1 Common Light Chain” or “2+1 CLC” format, with a first Fc comprising 2 Fab arms each binding a first antigen and a second Fc comprising 1 Fab arm binding a second antigen. The 2+1 CLC format comprises a first monomer comprising VH1-CH1-hinge-VH1-CH1-hinge-CH2-CH3, a second monomer comprising VH2-CH1-hinge-CH2-CH3, and a third monomer comprising VL-CL. The VL pairs with the first and second VH1 to form binding domains with a first antigen binding specificity; and the VL pairs with the VH2 to form a binding domain with a second antigen binding specificity. Panel E depicts the “2+1 mAb-scFv” format, with a first Fc comprising an N-terminal Fab arm binding a first antigen and a second Fc comprising an N-terminal Fab arm binding the first antigen and a C-terminal scFv binding a second antigen. The 2+1 mAb-scFv format comprises a first monomer comprising VH1-CH1-hinge-CH2-CH3, a second monomer comprising VH1-CH1-hinge-CH2-CH3-scFv, and a third monomer comprising VL-CL. The VL pairs with the first and second VH1 to form binding domains with binding specificity for the first antigen. Panel F depicts the “2+1 Fab₂-Fc×scFv-Fc” format, with a first Fc comprising two N-terminal Fab arms binding a first antigen and a second Fc domain comprising an N-terminal scFv binding a second antigen. The 2+1 Fab₂-Fc×scFv-Fc format comprises a first monomer comprising VH1-CH1-VH2-CH1-hinge-CH2-CH3, a second monomer comprising scFv-domain linker-CH2-CH3, and a third and fourth monomer comprising VL-CL. The VL pairs with the VH1 and VH2 to form binding domains with binding specificity for the first antigen. Panel O depicts the “2+2 mAb-scFv” format, with a first Fc comprising an N-terminal Fab arm binding a first antigen and a C-terminal scFv binding a second antigen and a second Fc comprising an N-terminal Fab arm binding the first antigen and a C-terminal scFv binding a second antigen. The 2+2 mAb-scFv format comprises a first monomer comprising VH1-CH1-hinge-CH2-CH3-scFv, a second monomer comprising VH1-CH1-hinge-CH2-CH3-scFv, and a third monomer comprising VL-CL. The VL pairs with the first and second VH1 to form binding domains with binding specificity for the first antigen. Panel P depicts the “1+1 OrthoFab” format, with a first Fc comprising a first Fab arm binding a first antigen and a second Fc comprising a second Fab arm binding second antigen. The 1+1 OrthoFab format comprises a first monomer comprising VH1-CH1′-hinge-CH2-CH3, a second monomer comprising VH2-CH1”-hinge-CH2-CH3, a third monomer comprising VL1-CL1, and a fourth monomer comprising VL2-CL2. The VL1 pairs with the VH1 to form a binding domain with a first antigen binding specificity; and the VL2 pairs with the VH2 to form a binding domain with a second antigen binding specificity. The VH1 and VL1 include complementary electrostatic variants and the VH2 and VL2 include complementary electrostatic variants (respectively including those described in Table 18), so that VH1 favorably pairs with VL1 and VH2 favorably pairs with VL2. The CH1′ and CL1 include complementary electrostatic variants (including those described in Table 27) and the CH1″ and CL2 include complementary steric variants (including those described in Table 28) so that CH1′ favorably pairs with CL1 and CH1″ favorably pairs with CL2. Panel Q depicts the “1+1 CrossMab” format, with a first Fc comprising a first Fab arm binding a first antigen and a second Fc comprising a second Fab arm binding second antigen. In one embodiment, the 1+1 CrossMab format comprises a first monomer comprising VL1-CH1′-hinge-CH2-CH3, a second monomer comprising VH2-CH1″-hinge-CH2-CH3, a third monomer comprising VH-CL1, and a fourth monomer comprising VL2-CL2. The VL1 pairs with the VH1 to form a binding domain with a first antigen binding specificity; and the VL2 pairs with the VH2 to form a binding domain with a second antigen binding specificity. The CH1″ and CL2 may include electrostatic variants (such as those described in Table 27) or steric variants (such as those described in Table 28) so that the CH1″ favorably pairs with CL2. The CL1 may be kappa or lambda constant light domain, although in preferred embodiments, the CL1 is lambda constant light domain. Panel R depicts the “2+2 Fab₂-scFv₂-Fc” format, with a first Fab-scFv arm and a second Fab-scFv arm, wherein the Fab binds a first antigen and the scFv binds second antigen. The 2+2 Fab₂-scFv-Fc format comprises a first monomer comprising a first heavy chain variable region (VH1) covalently (optionally via a linker) to a single-chain Fv covalently attached (optionally via a linker) to the N-terminus of a first heterodimeric Fc backbone (optionally via a linker), a second monomer comprising the VH1 covalently attached (optionally via a linker) to a single-chain Fv covalently attached (optionally via a linker) to the N-terminus of a second corresponding heterodimeric Fc backbone, and a third monomer comprising a light chain variable region covalently to a light chain constant domain, wherein the light chain variable region is complementary to the VH1. Additional bispecific formats include G) dual scFv, H) one-arm scFv-mAb, I) scFv-mAb, J) bispecific mAb, K) one-arm central-scFv, L) mAb-Fv, M) central-Fv, and N) trident.

[0169] FIG. 2 depicts the functional activity of IL23×TL1A bsAbs in a luciferase assay.

[0170] FIG. 3 depicts the functional activity of TL1A×IL23 bsAbs in a luciferase assay.

[0171] FIG. 4 depicts schematics showing (A) correct Fab pairings and (B) incorrect Fab pairings resulting from introduction of electrostatic variants at K213/K218:D122/E123 in the CH1:CL interface.

[0172] FIG. 5 depicts schematics showing (A) correct Fab pairings and (B) incorrect Fab pairings resulting from introduction of steric variants at A141:F118 in the CH1:CL interface.

[0173] FIG. 6 depicts schematics showing (A) correct Fab pairings and (B) incorrect Fab pairings resulting from introduction of electrostatic variants at Q39:Q38 in the VH:VL interface.

[0174] FIG. 7 depicts schematics showing (A) correct Fab pairings and (B) incorrect Fab pairings resulting from Q39E:Q38K in VH:VL interface and K213E/K218D:D122K/E123K in CH1:CL interface of Fab A, and Q39K:Q38E in VH:VL interface and A141F:F118A interface of Fab.

[0175] FIG. 8 depicts A) binding as measured by Biacore at 37° C. of TL1A analyte to TL1A×IL23 bsAb XENP53321, having the TL1A affinity optimized 041[TL1A]H1.33_L1.27 TL1a binding domain as compared to a control TL1A×IL23 bsAb having the parental 041[TL1A]H1L1 TL1A binding domain, and B) binding as measured Biacore at 37° C. of IL23 analyte to TL1A×IL23 bsAb XENP53282, having the IL23 affinity optimized IL23-A[IL23]H1_L1.117 IL23 binding domain compared to a control TL1A×IL23 bsAb having the parental IL23-A[IL23]H1L1 IL23 binding domain. Affinity optimization resulted in candidates with ~10× increase in affinity toward target antigen compared to parental clones.

[0176] FIG. 9 depicts the functional activity of XENP53387 compared to various bivalent TL1A and IL23 control mAbs.

[0177] FIG. 10 depicts TL1A inhibition by TL1A×IL-23 bispecific antibodies in the 1+1 OrthoFab format, along with controls, incorporating 069 or 111 anti-TL1A binding domains.

[0178] FIG. 11 depicts TL1A inhibition by TL1A×RSV bispecific antibody, along with bivalent TL1A mAb control, incorporating 041 to compare monovalent vs. bivalent inhibition activity.

[0179] FIG. 12 depicts TL1A inhibition (including IC₅₀ values) for TL1A×IL-23 bispecific antibodies in various bispecific formats.

[0180] FIG. 13 depicts IL23 inhibition (including IC₅₀ values) for TL1A×IL-23 bispecific antibodies in various bispecific formats.

[0181] FIG. 14 depicts IL23 inhibition by exemplary TL1A×IL23 bispecific antibodies, along with bivalent IL23 mAb controls using a bioluminescent cell-based assay in which the cells are engineered to express luciferase in response to IL23 signaling.

[0182] FIG. 15 depicts TL1A inhibition by exemplary TL1A×IL23 bispecific antibodies, along with bivalent TL1A mAb controls using a TL1A-responsive luciferase reporter Jurkat cell line in which luciferase is expressed under the control of an NF-xB response element.

[0183] FIG. 16 depicts serum concentration of indicated TL1A×IL23 bispecific antibodies over time in huFcRn mice after intravenous injection of 5 mg/kg.

[0184] FIG. 17 depicts serum concentration of indicated TL1A×IL23 bispecific antibodies over time in huFcRn mice after intravenous injection of 5 mg/kg.

### DETAILED DESCRIPTION

### I. Overview

[0185] Provided herein are anti-TL1A antibodies, anti-IL23 antibodies, and anti-TL1A×anti-IL23 bispecific antibodies. TL1A and IL23 are both believed to cause inflammatory responses in various diseases associated with IL23 and TL1A (e.g., inflammatory bowel disease, and Crohn's disease). Without being bound by any particular theory of operation, it is believed that in embodiments, the subject anti-TL1A×anti-TL23 bispecific antibodies advantageously inhibit both the TL1A- and TL23-associated inflammatory responses associated with such diseases. Likewise, it is believed that in embodiments, the subject anti-TL1A antibodies inhibit TL1A-associated inflammatory responses associated with such diseases, and the anti-IL23 antibodies inhibit IL23-associated inflammatory responses associated with such diseases.

[0186] Accordingly, in one aspect, provided herein are heterodimeric antibodies that bind to two different antigens, e.g., the antibodies are “bispecific,” in that they bind two different target antigens, generally TL1A and TL23 as described below. These heterodimeric antibodies can bind each of the target antigens either monovalently (e.g., there is a single antigen-binding domain such as a variable heavy and variable light domain pair) or bivalently (there are two antigen-binding domains that each independently bind the antigen). In some embodiments, the heterodimeric antibody provided herein includes one TL1A binding domain and one IL23 binding domain (e.g., heterodimeric antibodies in the “1+1 Fab-scFv-Fc,” “OrthoFab,” “CrossMab,” and “1+1 CLC” formats described herein, which are thus bispecific and bivalent). In other embodiments, the heterodimeric antibody provided herein includes one TL1A binding domain and two IL23 binding domains (e.g., heterodimeric antibodies in the “2+1 Fab2-scFv-Fc,” “2+1 mAb-scFv” and “2+1 Fab2-Fc×scFv-Fc” formats described herein, which are thus bispecific but trivalent, as they contain three antigen-binding domains (ABDs)). The heterodimeric antibodies provided herein are based on the use of different monomers that contain amino acid substitutions (i.e., “skew variants”) that “skew” formation of heterodimers over homodimers, as is more fully outlined below. In some embodiments, the heterodimeric antibodies are also coupled with purification variants (e.g., “pI variants”) that allow simple purification of the heterodimers away from the homodimers, as is similarly outlined below. The heterodimeric bispecific antibodies provided generally rely on the use of engineered or variant Fc domains that can self-assemble in production cells to produce heterodimeric proteins, and methods to generate and purify such heterodimeric proteins.

### II. Nomenclature

[0187] The naming nomenclature of particular antigen-binding domains (e.g., TL1A and IL23 binding domains) use a “Hx.xx_Ly.yy” type of format, with the numbers being unique identifiers to particular variable chain sequences. Thus, for example, the TL1A binding domain “70416_041[TL1a]_H1L1” (Tables 7-10) includes a variable heavy domain, H1, and a variable light domain L1. In the case that these sequences are used as scFvs, the designation “H1_L”, indicates that the binding domain includes a variable heavy domain “H1” combined with a variable light domain “L1,” and is in VH-linker-VL orientation, from N- to C-terminus. This molecule with the identical sequences of the heavy and light variable domains but in the reverse order (VL-linker-VH orientation, from N- to C-terminus) would be designated “L1_H1.” Similarly, different constructs may “mix and match” the heavy and light chains as will be evident from the sequence listing and the tables.

### III. Definitions

[0188] In order that the application may be more completely understood, several definitions are set forth below. Such definitions are meant to encompass grammatical equivalents.

[0189] As used herein, “tumor necrosis factor-like cytokine 1A,” “TL1A,” “TL1a,” “TNFSF15,” “vascular endothelial growth inhibitor,” “VEGI,” and “TNF super family member 15,” all refer to a member of tumor necrosis family that is capable of binding to the functional receptor death receptor 3 (DR3) on T cells. Exemplary sequence for human, mouse, and rat TL1A are provided in SEQ ID NOS: 4-6. Such TL1A sequences are useful for the development of TL1A antigen binding domains. TL1A may also be referred to as tumor necrosis factor superfamily 15 (TNFS15) or vascular endothelial growth inhibitor (VEGI). TL1A can activate both the NF-κB and MAPK signaling pathways, and acts as an autocrine factor to induce apoptosis in endothelial cells. TL1A is also found to inhibit endothelial cell proliferation, and thus is believed to function as an angiogenesis inhibitor. In humans, TL1A is encoded by the TNFSF15 gene, and several TNFSF15 SNPs have been found to be associated with inflammatory bowel disease.

[0190] As used herein, “interleukin 23,” “IL-23,” “IL23,” all refer to a heterodimeric inflammatory cytokine that is part of the IL-12 family. IL23 is composed of an IL-12B (IL-12p40) subunit and an IL-23 (IL-23p19, also referred to as IL23p19, IL-23A, or TL23A) subunit. Exemplary sequence for human, mouse, and cynomolgus IL23p19 are provided in SEQ ID NOS: 1-3. Such TL23 sequences are useful for the development of IL23 antigen binding domains. IL23 binds to the heterodimeric IL-23 receptor, which comprises an IL-12Rβ1 and IL-23R. IL-23 is secreted by activated dendritic cells, macrophages or monocytes, as well as innate lymphoid cells and TS T cells. IL-23 imbalance and increase is associated with autoimmune diseases and cancer.

[0191] By “ablation” herein is meant a decrease or removal of activity. Thus, for example, “ablating FcγR binding” means the Fc region amino acid variant has less than 50% starting binding as compared to an Fc region not containing the specific variant, with more than 70-80-90-95-98% loss of activity being preferred, and in general, with the activity being below the level of detectable binding in a Biacore, SPR or BLI assay. Of particular use in the ablation of FcγR binding are those shown in Table 1, which generally are added to both monomers. Table 1 depicts useful ablation variants that ablate FcγR binding (also referred to as “knockouts” or “KO” variants). In some embodiments, such ablation variants are included in the Fc domain of both monomers of the subject antibody described herein. In other embodiments, the ablation variants are only included on only one variant Fc domain.

TABLE 1
Ablation Variants

| | |
|---|---|
| G236R | L234A/L235A/D265S |
| S239G | L234A/L235A/P329A |
| S239K | L234A/L235A/P329G |
| S239Q | |
| S239R | |
| V266D | |
| S267K | |
| S267R | |
| H268K | |
| E269R | |
| T299R | |
| T299K | |
| K322A | |
| A327G | |
| A327L | |
| A327N | |
| A327Q | |
| L328E | |
| L328R | |
| P329A | |
| P329H | |
| P329K | |
| A330L | |
| A330S/P331S | |
| I332K | |
| I332R | |
| V266D/A327Q | |
| V266D/P329K | |
| S267R/A327Q | |
| S267R/P329K | |
| G236R/L328R | |
| E233P/L234V/L235A/G236_/S239K | |
| E233P/L234V/L235A/G236_/S267K | |
| E233P/L234V/L235A/G236_/S239K/A327G | |
| E233P/L234V/L235A/G236_/S267K/A327G | |
| E233P/L234V/L235A/G236_{—} | |
| S239K/S267K | |
| S267K/P329K | |

[0192] By “ADCC” or “antibody dependent cell-mediated cytotoxicity” as used herein is meant the cell-mediated reaction, wherein nonspecific cytotoxic cells that express FcγRs recognize bound antibody on a target cell and subsequently cause lysis of the target cell. ADCC is correlated with binding to FcγRIIIa; increased binding to FcγRIIIa leads to an increase in ADCC activity.

[0193] By “ADCP” or antibody dependent cell-mediated phagocytosis as used herein is meant the cell-mediated reaction wherein nonspecific phagocytic cells that express FcγRs recognize bound antibody on a target cell and subsequently cause phagocytosis of the target cell.

[0194] The term “complement-dependent cytotoxicity” or CDC (also called CMC) refers to a mechanism for inducing cell death in which an Fc effector domain(s) of a target-bound antibody activates a series of enzymatic reactions culminating in the formation of holes in the target cell membrane. Typically, antigen-antibody complexes such as those on antibody-coated target cells bind and activate complement component C1q which in turn activates the complement cascade leading to target cell death. Activation of complement may also result in deposition of complement components on the target cell surface that facilitate ADCC by binding complement receptors (e.g., CR3) on leukocytes.

[0195] As used herein, the term “antibody” is used to refer to intact antibodies, antigen-binding fragments thereof, or bispecific and multispecific antibodies. Antibodies provided herein can take on a number of formats as described herein, including intact antibodies as well as antibody derivatives, fragments and mimetics, described herein. Typically, fragments compete with the intact antibody from which they were derived for specific binding to the target and include one or more fragments of an intact antibody that retain the ability to specifically bind to a given antigen. Examples of antigen-binding fragments of antibodies include separate heavy chains, light chains, Fab, Fab′, F(ab′)2, F(ab)c, Dabs, nanobodies, and scFvs. Fragments can be produced by recombinant DNA techniques, or by enzymatic or chemical separation of intact immunoglobulins.

[0196] A “monovalent antibody” comprises one antigen-binding site per molecule (e.g., IgG or Fab). In some instances, a monovalent antibody can have more than one antigen-binding sites, but the binding sites are from different antigens.

[0197] A “bivalent antibody” comprises two antigen-binding sites per molecule (e.g., IgG). In some instances, the two binding sites have the same antigen specificities. However, bivalent antibodies may be bispecific.

[0198] A “monospecific antibody” comprises two identical antigen-binding sites per molecule (e.g., IgG) such that the two binding sites bind identical epitope on the antigen. Thus, they compete with each other on binding to one antigen molecule. Most antibodies found in nature are monospecific. In some instances, a monospecific antibody can also be a monovalent antibody (e.g., Fab).

[0199] The term “bispecific antibody” as used herein refers to a hybrid antibody having two different binding specificities, e.g., two different heavy/light chain pairs, giving rise to two antigen-binding sites with specificity for different antigens. The term “multispecific antibody” refers to a hybrid antibody having multiple different binding specificities (e.g., multiple antigen-binding sites with specificity for multiple antigens.

[0200] Intact antibodies are “Y” shaped tetramers. Each tetramer is typically composed of two identical pairs of polypeptide chains, each pair having one “light chain” monomer (typically having a molecular weight of about 25 kDa) and one “heavy chain” monomer (typically having a molecular weight of about 50-70 kDa).

[0201] Other useful antibody formats include, but are not limited to, the “1+1 Fab-scFv-Fc,” “1+1 common light chain,” “OrthoFab,” “CrossMab,” and “2+2 mAb-scFv” formats provided herein (see, e.g., FIG. 1). Additional useful antibody formats include, but are not limited to, “2+1 Fab2-scFv-Fc,” “2+1 mAb-scFv,” and “2+1 Fab2-Fc×scFv-Fc,” “2+1 common light chain,” “mAb-Fv,” “mAb-scFv,” “central-Fv,” “one-armed scFv-mAb,” “scFv-mAb,” “dual scFv,” and “trident” format antibodies (FIG. 1). See also, US20180127501A1, which is incorporated by reference herein, particularly in pertinent part relating to antibody formats (see, e.g., FIG. 2 of US20180127501A1).

[0202] Antibody heavy chains typically include a variable heavy (VH) domain, which includes vhCDR1-3, and an Fc domain, which includes a CH2-CH3 monomer. In some embodiments, antibody heavy chains include a hinge and CH1 domain. Intact antibody heavy chains are monomers that are organized, from N- to C-terminus: VH-CH1-hinge-CH2-CH3. The CH1-hinge-CH2-CH3 is collectively referred to as the heavy chain “constant domain” or “constant region” of the antibody, of which there are five different categories or “isotypes”: IgA, IgD, IgG, IgE and IgM.

[0203] In some embodiments, the antibodies provided herein include IgG isotype constant domains, which has several subclasses, including, but not limited to IgG1, IgG2, IgG3, and IgG4. In the IgG subclass of immunoglobulins, there are several immunoglobulin domains in the heavy chain. By “immunoglobulin (Ig) domain” herein is meant a region of an immunoglobulin having a distinct tertiary structure. Of interest in the present invention are the heavy chain domains, including, the constant heavy (CH) domains and the hinge domains. In the context of IgG antibodies, the IgG isotypes each have three CH regions. Accordingly, “CH” domains in the context of IgG are as follows: “CH1” refers to positions 118-215 according to the EU index. “Hinge” refers to positions 216-230 according to the EU index. “CH2” refers to positions 231-340 according to the EU index, and “CH3” refers to positions 341-447 according to the EU index. As shown in Table 2, the exact numbering and placement of the heavy chain domains can be different among different numbering systems. As shown herein and described below, the pI variants can be in one or more of the CH regions, as well as the hinge region, discussed below.

[0204] It should be noted that IgG1 has different allotypes with polymorphisms at 356 (D or E) and 358 (L or M). The sequences depicted herein use the 356E/358M allotype, however the other allotype is included herein. That is, any sequence inclusive of an IgG1 Fc domain included herein can have 356D/358L replacing the 356E/358M allotype. It should be understood that therapeutic antibodies can also comprise hybrids of isotypes and/or subclasses. For example, as shown in US Publication 2009/0163699, incorporated by reference, the present antibodies, in some embodiments, include human IgG1/G2 hybrids. Human constant regions show allotypic variation and isoallotypic variation between different individuals: the constant regions can differ in different individuals at one or more polymorphic positions. Isoallotypes differ from allotypes in that sera recognizing an isoallotype bind to a non-polymorphic region of one or more other isotypes.

[0205] By “Fc” or “Fc region” or “Fc domain” as used herein is meant the polypeptide comprising the constant region of an antibody, in some instances, excluding all of the first constant region immunoglobulin domain (e.g., CH1) or a portion thereof, and in some cases, optionally including all or part of the hinge. For IgG, the Fc domain comprises immunoglobulin domains CH2 and CH3 (C72 and C73), and optionally all or a portion of the hinge region between CH1 (C71) and CH2 (C72). Thus, in some cases, the Fc domain includes, from N- to C-terminal, CH2-CH3 and hinge-CH2-CH3. In some embodiments, the Fc domain is that from IgG1, IgG2, IgG3 or IgG4, with IgG1 hinge-CH2-CH3 and IgG4 hinge-CH2-CH3 finding particular use in many embodiments. Additionally, in the case of human IgG1 Fc domains, the hinge may include a C220S amino acid substitution. Furthermore, in the case of human IgG4 Fc domains, the hinge may include a S228P amino acid substitution. Although the boundaries of the Fc region may vary, the human IgG heavy chain Fc region is usually defined to include residues E216, C226, or A231 to its carboxyl-terminal, wherein the numbering is according to the EU index. In some embodiments, as is more fully described below, amino acid modifications are made to the Fc region, for example to alter binding to one or more FcγR or to the FcRn.

[0206] By “heavy chain constant region” herein is meant the CH1-hinge-CH2-CH3 portion of an antibody (or fragments thereof), excluding the variable heavy domain; in EU numbering of human IgG1 this is amino acids 118-447. By “heavy chain constant region fragment” herein is meant a heavy chain constant region that contains fewer amino acids from either or both of the N- and C-termini but still retains the ability to form a dimer with another heavy chain constant region.

[0207] Another type of domain of the heavy chain is the hinge region. By “hinge” or “hinge region” or “antibody hinge region” or “hinge domain” herein is meant the flexible polypeptide comprising the amino acids between the first and second constant domains of an antibody. Structurally, the IgG CH1 domain ends at EU position 215, and the IgG CH2 domain begins at residue EU position 231. Thus, for IgG the antibody hinge is herein defined to include positions 216 (E216 in IgG1) to 230 (P230 in IgG1), wherein the numbering is according to the EU index. In some cases, a “hinge fragment” is used, which contains fewer amino acids at either or both of the N- and C-termini of the hinge domain. As noted herein, pI variants can be made in the hinge region as well. Many of the antibodies herein have at least one the cysteines at position 220 according to EU numbering (hinge region) replaced by a serine. Generally, this modification is on the “scFv monomer” side (when 1+1 or 2+1 formats are used) for most of the sequences depicted herein, although it can also be on the “Fab monomer” side, or both, to reduce disulfide formation. Specifically included within the sequences herein are one or both of these cysteines replaced (C220S).

[0208] The exact numbering and placement of the heavy chain constant region domains (i.e., CH1, hinge, CH2 and CH3 domains) can be different among different numbering systems. A useful comparison of heavy constant region numbering according to EU and Kabat is as below, see Edelman et al., 1969, Proc Natl Acad Sci USA 63:78-85 and Kabat et al., 1991, Sequences of Proteins of Immunological Interest, 5th Ed., United States Public Health Service, National Institutes of Health, Bethesda, entirely incorporated by reference.

TABLE 2

| | EU Numbering | Kabat Numbering |
|---|---|---|
| CH1 | 118-215 | 114-223 |
| Hinge | 216-230 | 226-243 |
| CH2 | 231-340 | 244-360 |
| CH3 | 341-447 | 361-478 |

[0209] The antibody light chain generally comprises two domains: the variable light domain (VL), which includes light chain CDRs vlCDR1-3, and a constant light chain region (often referred to as CL or CK). The antibody light chain is typically organized from N- to C-terminus: VL-CL.

[0210] By “antigen-binding domain” or “ABD” herein is meant a set of six Complementary Determining Regions (CDRs) that, when present as part of a polypeptide sequence, specifically binds a target antigen (e.g., TL1A or IL23) as discussed herein. These CDRs are generally present as a first set of variable heavy CDRs (vhCDRs or VHCDRs) and a second set of variable light CDRs (vlCDRs or VLCDRs), each comprising three CDRs: vhCDR1, vhCDR2, vhCDR3 variable heavy CDRs and vlCDR1, vlCDR2 and vlCDR3 vhCDR3 variable light CDRs. The CDRs are present in the variable heavy domain (vhCDR1-3) and variable light domain (vlCDR1-3). The variable heavy domain and variable light domain from an Fv region.

[0211] The present invention provides a large number of different CDR sets. In this case, a “full CDR set” comprises the three variable light and three variable heavy CDRs, e.g., a vlCDR1, vlCDR2, vlCDR3, vhCDR1, vhCDR2 and vhCDR3. These can be part of a larger variable light or variable heavy domain, respectfully. In addition, as more fully outlined herein, the variable heavy and variable light domains can be on separate polypeptide chains, when a heavy and light chain is used (for example when Fabs are used), or on a single polypeptide chain in the case of scFv sequences.

[0212] The exact numbering and placement of the CDRs can be different among different numbering systems. However, it should be understood that the disclosure of a variable heavy and/or variable light sequence includes the disclosure of the associated (inherent) CDRs. Accordingly, the disclosure of each variable heavy region is a disclosure of the vhCDRs (e.g., vhCDR1, vhCDR2 and vhCDR3) and the disclosure of each variable light region is a disclosure of the vlCDRs (e.g., vlCDR1, vlCDR2 and vlCDR3). A useful comparison of CDR numbering is as below, see Lefranc et al., Dev. Comp. Immunol. 27(1):55-77 (2003):

TABLE 3

| | \hat{ }Kabat + | | | | | | |
|---|---|---|---|---|---|---|---|
| | Chothia | *IMGT | \hat{ }Kabat | \hat{ }AbM | \hat{ }Chothia | \hat{ }Contact | Xencor |
| vhCDR1 | 26-35 | 27-38 | 31-35 | 26-35 | 26-32 | 30-35 | 27-35 |
| vhCDR2 | 50-65 | 56-65 | 50-65 | 50-58 | 52-56 | 47-58 | 54-61 |
| vhCDR3 | 95-102 | 105-117 | 95-102 | 95-102 | 95-102 | 93-101 | 103-116 |
| VICDR1 | 24-34 | 27-38 | 24-34 | 24-34 | 24-34 | 30-36 | 27-38 |
| VICDR2 | 50-56 | 56-65 | 50-56 | 50-56 | 50-56 | 46-55 | 56-62 |
| VICDR3 | 89-97 | 105-117 | 89-97 | 89-97 | 89-97 | 89-96 | 97-105 |

*CDR boundaries using IMGT numbering
\hat{ }CDR boundaries using Kabat numbering

[0213] Throughout the present specification, the Kabat numbering system is generally used when referring to a residue in the variable domain (approximately, residues 1-107 of the light chain variable region and residues 1-113 of the heavy chain variable region) and the light chain constant region, and the EU numbering system for the heavy chain constant region (CH1, hinge, and Fc regions) (e.g., Kabat et al., supra (1991)). The numbering used in the sequence listing and tables for the identification of the CDRs is Kabat, though other numbering systems can be used as shown, e.g., in Table 3.

[0214] The CDRs contribute to the formation of the antigen-binding, or more specifically, epitope binding site of the antigen-binding domains and antibodies. “Epitope” refers to a determinant that interacts with a specific antigen-binding site in the variable region of an antibody molecule known as a paratope. Epitopes are groupings of molecules such as amino acids or sugar side chains and usually have specific structural characteristics, as well as specific charge characteristics. A single antigen may have more than one epitope.

[0215] The epitope may comprise amino acid residues directly involved in the binding (also called immunodominant component of the epitope) and other amino acid residues, which are not directly involved in the binding, such as amino acid residues which are effectively blocked by the specifically antigen-binding peptide; in other words, the amino acid residue is within the footprint of the specifically antigen-binding peptide.

[0216] Epitopes may be either conformational or linear. A conformational epitope is produced by spatially juxtaposed amino acids from different segments of the linear polypeptide chain. A linear epitope is one produced by adjacent amino acid residues in a polypeptide chain. Conformational and nonconformational epitopes may be distinguished in that the binding to the former but not the latter is lost in the presence of denaturing solvents. Methods of determining spatial conformation of epitopes include, for example, x-ray crystallography and 2-dimensional nuclear magnetic resonance. See, e.g., Epitope Mapping Protocols, in Methods in Molecular Biology, Vol. 66, Glenn E. Morris, Ed. (1996).

[0217] An epitope typically includes at least 3, and more usually, at least 5 or 8-10 amino acids in a unique spatial conformation. Antibodies that recognize the same epitope can be verified in a simple immunoassay showing the ability of one antibody to block the binding of another antibody to a target antigen, for example “binning.” As outlined below, the invention not only includes the enumerated antigen-binding domains and antibodies herein, but those that compete for binding with the epitopes bound by the enumerated antigen-binding domains.

[0218] Antibodies that recognize the same or overlapping epitopes can be identified in a simple immunoassay showing the ability of one antibody to compete with the binding of another antibody to a target antigen. The epitope of an antibody can also be defined by X-ray crystallography of the antibody bound to its antigen to identify contact residues. Alternatively, two antibodies have the same epitope if all amino acid mutations in the antigen that reduce or eliminate binding of one antibody reduce or eliminate binding of the other. Two antibodies have overlapping epitopes if some amino acid mutations that reduce or eliminate binding of one antibody reduce or eliminate binding of the other.

[0219] Competition between antibodies is determined by an assay in which an antibody under test inhibits specific binding of a reference antibody to a common antigen (see, e.g., Junghans et al., Cancer Res. 50:1495, 1990). A test antibody competes with a reference antibody if an excess of a test antibody (e.g., at least 2 times, 5 times, 10 times, 20 times or 100 times) inhibits binding of the reference antibody by at least 50% but preferably 75%, 90% or 99% as measured in a competitive binding assay. Antibodies identified by competition assay (competing antibodies) include antibodies binding to the same epitope as the reference antibody and antibodies binding to an adjacent epitope sufficiently proximal to the epitope bound by the reference antibody for steric hindrance to occur.

[0220] In some embodiments, the six CDRs of the antigen-binding domain are contributed by a variable heavy and a variable light domain. In a “Fab” format, the set of 6 CDRs are contributed by two different polypeptide sequences, the variable heavy domain (vh or VH; containing the vhCDR1, vhCDR2 and vhCDR3) and the variable light domain (vl or VL; containing the vlCDR1, vlCDR2 and vlCDR3), with the C-terminus of the vh domain being attached to the N-terminus of the CH1 domain of the heavy chain and the C-terminus of the vl domain being attached to the N-terminus of the constant light domain (and thus forming the light chain). In a scFv format, the vh and vl domains are covalently attached, generally through the use of a linker (a “scFv linker”) as outlined herein, into a single polypeptide sequence, which can be either (starting from the N-terminus) vh-linker-vl or vl-linker-vh, with the former being generally preferred (including optional domain linkers on each side, depending on the format used. In general, the C-terminus of the scFv domain is attached to the N-terminus of all or part of the hinge in the second monomer.

[0221] By “variable region” or “variable domain” as used herein is meant the region of an immunoglobulin that comprises one or more Ig domains substantially encoded by any of the Vx, VW, and/or VH genes that make up the kappa, lambda, and heavy chain immunoglobulin genetic loci respectively, and contains the CDRs that confer antigen specificity. Thus, a “variable heavy domain” pairs with a “variable light domain” to form an antigen-binding domain (“ABD”). In addition, each variable domain comprises three hypervariable regions (“complementary determining regions,” “CDRs”) (vhCDR1, vhCDR2 and vhCDR3 for the variable heavy domain and vlCDR1, vlCDR2 and vlCDR3 for the variable light domain) and four framework (FR) regions, arranged from amino-terminus to carboxy-terminus in the following order: FR1-CDR1-FR2-CDR2-FR3-CDR3-FR4.

[0222] By “Fab” or “Fab region” as used herein is meant the antibody region that comprises the VH, CH1, VL, and CL immunoglobulin domains, generally on two different polypeptide chains (e.g., VH-CH1 on one chain and VL-CL on the other). Fab may refer to this region in isolation, or this region in the context of a bispecific antibody of the invention. In the context of a Fab, the Fab comprises an Fv region in addition to the CH1 and CL domains.

[0223] By “Fv” or “Fv fragment” or “Fv region” as used herein is meant the antibody region that comprises the VL and VH domains. Fv regions can be formatted as both Fabs (as discussed above, generally two different polypeptides that also include the constant regions as outlined above) and single chain Fvs (scFvs), where the vl and vh domains are included in a single peptide, attached generally with a linker as discussed herein.

[0224] By “single chain Fv” or “scFv” herein is meant a variable heavy domain covalently attached to a variable light domain, generally using a scFv linker as discussed herein, to form a scFv or scFv domain. A scFv domain can be in either orientation from N- to C-terminus (vh-linker-vl or vl-linker-vh). In the sequences depicted in the sequence listing and in the tables, the order of the vh and vl domain is indicated in the name, e.g., H.X_L.Y means N- to C-terminal is vh-linker-vl, and L.Y_H.X is vl-linker-vh.

[0225] Some embodiments of the subject antibodies provided herein comprise at least one scFv domain, which, while not naturally occurring, generally includes a variable heavy domain and a variable light domain, linked together by a scFv linker. As outlined herein, while the scFv domain is generally from N- to C-terminus oriented as VH-scFv linker-VL, this can be reversed for any of the scFv domains (or those constructed using vh and vl sequences from Fabs), to VL-scFv linker-VH, with optional linkers at one or both ends depending on the format.

[0226] By “modification” or “variant” herein is meant an amino acid substitution, insertion, and/or deletion in a polypeptide sequence or an alteration to a moiety chemically linked to a protein. For example, a modification may be an altered carbohydrate or PEG structure attached to a protein. By “amino acid modification” herein is meant an amino acid substitution, insertion, and/or deletion in a polypeptide sequence. For clarity, unless otherwise noted, the amino acid modification is always to an amino acid coded for by DNA, e.g., the 20 amino acids that have codons in DNA and RNA.

[0227] By “amino acid substitution” or “substitution” herein is meant the replacement of an amino acid at a particular position in a parent polypeptide sequence with a different amino acid. In particular, in some embodiments, the substitution is to an amino acid that is not naturally occurring at the particular position, either not naturally occurring within the organism or in any organism. For example, the substitution E272Y refers to a variant polypeptide, in this case an Fc variant, in which the glutamic acid at position 272 is replaced with tyrosine. For clarity, a protein which has been engineered to change the nucleic acid coding sequence but not change the starting amino acid (for example exchanging CGG (encoding arginine) to CGA (still encoding arginine) to increase host organism expression levels) is not an “amino acid substitution;” that is, despite the creation of a new gene encoding the same protein, if the protein has the same amino acid at the particular position that it started with, it is not an amino acid substitution.

[0228] By “amino acid insertion” or “insertion” as used herein is meant the addition of an amino acid sequence at a particular position in a parent polypeptide sequence. For example, −233E or 233E designates an insertion of glutamic acid after position 233 and before position 234. Additionally, −233ADE or A233ADE designates an insertion of AlaAspGlu after position 233 and before position 234.

[0229] By “amino acid deletion” or “deletion” as used herein is meant the removal of an amino acid sequence at a particular position in a parent polypeptide sequence. For example, E233- or E233 #, E233( ) or E233del designates a deletion of glutamic acid at position 233. Additionally, EDA233- or EDA233 #designates a deletion of the sequence GluAspAla that begins at position 233.

[0230] By “variant protein” or “protein variant,” or “variant” as used herein is meant a protein that differs from that of a parent protein by virtue of at least one amino acid modification. The protein variant has at least one amino acid modification compared to the parent protein, yet not so many that the variant protein will not align with the parental protein using an alignment program such as that described below. In general, variant proteins (such as variant Fc domains, etc., outlined herein, are generally at least 75, 80, 85, 90, 91, 92, 93, 94, 95, 96, 97, 98 or 99% identical to the parent protein, using the alignment programs described below, such as BLAST.

[0231] For purposes of classifying amino acids substitutions as conservative or nonconservative, amino acids are grouped as follows: Group I (hydrophobic side chains): met, ala, val, leu, ile; Group II (neutral hydrophilic side chains): cys, ser, thr; Group III (acidic side chains): asp, glu; Group IV (basic side chains): asn, gln, his, lys, arg; Group V (residues influencing chain orientation): gly, pro; and Group VI (aromatic side chains): trp, tyr, phe. Conservative substitutions involve substitutions between amino acids in the same class. Non-conservative substitutions constitute exchanging a member of one of these classes for a member of another.

[0232] Percentage sequence identities are determined with antibody sequences maximally aligned by the Kabat numbering convention for light chains and heavy chain variable regions or EU numbering for a heavy chain constant region. After alignment, if a subject antibody region (e.g., the entire mature variable region of a heavy or light chain) is being compared with the same region of a reference antibody, the percentage sequence identity between the subject and reference antibody regions is the number of positions occupied by the same amino acid in both the subject and reference antibody region divided by the total number of aligned positions of the two regions, with gaps not counted, multiplied by 100 to convert to percentage.

[0233] “Variant” as used herein also refers to particular amino acid modifications that confer particular function (e.g., a “heterodimerization variant,” “pI variant,” “ablation variant,” etc.).

[0234] As described below, in some embodiments the parent polypeptide, for example an Fc parent polypeptide, is a human wild-type sequence, such as the heavy constant domain or Fc region from IgG1, IgG2, IgG3 or IgG4, although human sequences with variants can also serve as “parent polypeptides”, for example the IgG1/2 hybrid of US Publication 2006/0134105 can be included. The protein variant sequence herein will preferably possess at least about 80% identity with a parent protein sequence, and most preferably at least about 90% identity, more preferably at least about 95-98-99% identity. Accordingly, by “antibody variant” or “variant antibody” as used herein is meant an antibody that differs from a parent antibody by virtue of at least one amino acid modification, “IgG variant” or “variant IgG” as used herein is meant an antibody that differs from a parent IgG (again, in many cases, from a human IgG sequence) by virtue of at least one amino acid modification, and “immunoglobulin variant” or “variant immunoglobulin” as used herein is meant an immunoglobulin sequence that differs from that of a parent immunoglobulin sequence by virtue of at least one amino acid modification. “Fc variant” or “variant Fc” as used herein is meant a protein comprising an amino acid modification in an Fc domain as compared to an Fc domain of human IgG1, IgG2 or IgG4.

[0235] “Fc variant” or “variant Fc” as used herein is meant a protein comprising an amino acid modification in an Fc domain. The modification can be an addition, deletion, or substitution. The Fc variants are defined according to the amino acid modifications that compose them. Thus, for example, N434S or 434S is an Fc variant with the substitution for serine at position 434 relative to the parent Fc polypeptide, wherein the numbering is according to the EU index. Likewise, M428L/N434S defines an Fc variant with the substitutions M428L and N434S relative to the parent Fc polypeptide. The identity of the WT amino acid may be unspecified, in which case the aforementioned variant is referred to as 428L/4345. It is noted that the order in which substitutions are provided is arbitrary, that is to say that, for example, 428L/4345 is the same Fc variant as 4345/428L, and so on. For all positions discussed herein that relate to antibodies or derivatives and fragments thereof (e.g., Fc domains), unless otherwise noted, amino acid position numbering is according to the EU index. The “EU index” or “EU index as in Kabat” or “EU numbering” scheme refers to the numbering of the EU antibody (Edelman et al., 1969, Proc Natl Acad Sci USA 63:78-85, hereby entirely incorporated by reference). The modification can be an addition, deletion, or substitution.

[0236] One or several amino acids at the amino or carboxy terminus of the light and/or heavy chain, such as the C-terminal lysine of the heavy chain, may be missing or derivatized in a proportion or all the molecules. Counter ions may or may not be present to form a pharmaceutically acceptable salt. Water or other solvent may or may not be associated with an antibody (e.g., as a hydrate or solvate). Amino acid substitutions can be made in the constant regions to reduce or increase effector functions such as complement-mediated cytotoxicity or ADCC (see, e.g., Winter et al., U.S. Pat. No. 5,624,821; Tso et al., U.S. Pat. No. 5,834,597; and Lazar et al., Proc. Natl. Acad. Sci. USA 103:4005, 2006), or to prolong half-life in humans (see, e.g., Hinton et al., J. Biol. Chem. 279:6213, 2004). For example, there are many known mutations in IgG Fc that increase FcRn binding. Exemplary substitutions include Gln at position 250 and/or Leu at position 428, Ser or Asn at position 434, Tyr at position 252, Thr at position 254, Glu at position 256, and Ala at position 434 (EU numbering). Increased FcRn binding is advantageous in making hybrid proteins compete more strongly with endogenous IgG for binding to FcRn. Numerous mutations are also known for reducing any of ADCC, ADCP or CDC (see, e.g., Winter et al., U.S. Pat. No. 5,624,821; Tso et al., U.S. Pat. No. 5,834,597; and Lazar et al., Proc. Natl. Acad. Sci. USA 103:4005, 2006). For example, substitution of any of amino acid residues at positions 234, 235, 236 and/or 237 reduce affinity for Fcγ receptors, particularly FcγRI receptor (see, e.g., U.S. Pat. No. 6,624,821). Optionally, amino acid residues at positions 234, 236 and/or 237 in human IgG2 are substituted with Ala and at position 235 with Gln or Glu (see, e.g., U.S. Pat. No. 5,624,821). Other substitutions reducing effector functions include Ala at position 268, Gly or Ala at position 297, Leu at position 309, Ala at position 322, Gly at position 327, Ser at position 330, Ser at position 331, Ser at position 238, Ala at position 268, Leu at position 309.

[0237] In general, variant Fe domains have at least about 80, 85, 90, 95, 97, 98 or 99 percent identity to the corresponding parental human IgG Fc domain (using the identity algorithms discussed below, with one embodiment utilizing the BLAST algorithm, using default parameters). Alternatively, the variant Fc domains can have from 1, 2, 3, 4, 5, 6, 7, 8, 9, 10, 11, 12, 13, 14, 15, 16, 11, 12, 13, 14, 15, 16, 17, 18, 19 or 20 amino acid modifications as compared to the parental Fc domain. Alternatively, the variant Fc domains can have up to 1, 2, 3, 4, 5, 6, 7, 8, 9, 10, 11, 12, 13, 14, 15, 16, 11, 12, 13, 14, 15, 16, 17, 18, 19 or 20 amino acid modifications as compared to the parental Fc domain. Additionally, as discussed herein, the variant Fc domains described herein still retain the ability to form a dimer with another Fc domain as measured using known techniques as described herein, such as non-denaturing gel electrophoresis.

[0238] By “protein” as used herein is meant at least two covalently attached amino acids, which includes proteins, polypeptides, oligopeptides and peptides. In addition, polypeptides that make up the antibodies of the invention may include synthetic derivatization of one or more side chains or termini, glycosylation, PEGylation, circular permutation, cyclization, linkers to other molecules, fusion to proteins or protein domains, and addition of peptide tags or labels.

[0239] By “residue” as used herein is meant a position in a protein and its associated amino acid identity. For example, Asparagine 297 (also referred to as Asn297 or N297) is a residue at position 297 in the human antibody IgG1.

[0240] By “IgG subclass modification” or “isotype modification” as used herein is meant an amino acid modification that converts one amino acid of one IgG isotype to the corresponding amino acid in a different, aligned IgG isotype. For example, because IgG1 comprises a tyrosine and IgG2 a phenylalanine at EU position 296, a F296Y substitution in IgG2 is considered an IgG subclass modification.

[0241] By “non-naturally occurring modification” as used herein is meant an amino acid modification that is not isotypic. For example, because none of the human IgGs comprise a serine at position 434, the substitution 434S in IgG1, IgG2, IgG3, or IgG4 (or hybrids thereof) is considered a non-naturally occurring modification.

[0242] By “amino acid” and “amino acid identity” as used herein is meant one of the 20 naturally occurring amino acids that are coded for by DNA and RNA.

[0243] By “effector function” as used herein is meant a biochemical event that results from the interaction of an antibody Fc region with an Fc receptor or ligand. Effector functions include but are not limited to ADCC, ADCP, and CDC.

[0244] By “IgG Fc ligand” as used herein is meant a molecule, preferably a polypeptide, from any organism that binds to the Fc region of an IgG antibody to form an Fc/Fc ligand complex. Fc ligands include but are not limited to FcγRIs, FcγRIIs, FcγRIIIs, FcRn, C1q, C3, mannan binding lectin, mannose receptor, staphylococcal protein A, streptococcal protein G, and viral FcγR. Fc ligands also include Fc receptor homologs (FcRH), which are a family of Fc receptors that are homologous to the FcγRs (Davis et al., 2002, Immunological Reviews 190:123-136, entirely incorporated by reference). Fc ligands may include undiscovered molecules that bind Fc. Particular IgG Fc ligands are FcRn and Fc gamma receptors. By “Fc ligand” as used herein is meant a molecule, preferably a polypeptide, from any organism that binds to the Fc region of an antibody to form an Fc/Fc ligand complex.

[0245] By “Fc gamma receptor,” “FcγR,” or “FcgammaR” as used herein is meant any member of the family of proteins that bind the IgG antibody Fc region and is encoded by an FcγR gene. In humans this family includes but is not limited to FcγRI (CD64), including isoforms FcγRIa, FcγRIb, and FcγRIc; FcγRII (CD32), including isoforms FcγRIIa (including allotypes H131 and R131), FcγRIIb (including FcγRIIb-1 and FcγRIIb-2), and FcγRIIc; and FcγRIII (CD16), including isoforms FcγRIIIa (including allotypes V158 and F158) and FcγRIIIb (including allotypes FcγRIIb-NA1 and FcγRIIb-NA2) (Jefferis et al., 2002, Immunol Lett 82:57-65, entirely incorporated by reference), as well as any undiscovered human FcγRs or FcγR isoforms or allotypes. An FcγR may be from any organism, including but not limited to humans, mice, rats, rabbits, and monkeys. Mouse FcγRs include but are not limited to FcγRI (CD64), FcγRII (CD32), FcγRIII (CD16), and FcγRIII-2 (CD16-2), as well as any undiscovered mouse FcγRs or FcγR isoforms or allotypes.

[0246] By “FcRn” or “neonatal Fc Receptor” as used herein is meant a protein that binds the IgG antibody Fc region and is encoded at least in part by an FcRn gene. The FcRn may be from any organism, including but not limited to humans, mice, rats, rabbits, and monkeys. The functional FcRn protein comprises two polypeptides, often referred to as the heavy chain and light chain. The light chain is beta-2-microglobulin and the heavy chain is encoded by the FcRn gene. Unless otherwise noted herein, FcRn or an FcRn protein refers to the complex of FcRn heavy chain with beta-2-microglobulin. A variety of FcRn variants used to increase binding to the FcRn receptor, and in some cases, to increase serum half-life. An “FcRn variant” is an amino acid modification that contributes to increased binding to the FcRn receptor, and suitable FcRn variants are shown below.

[0247] By “parent polypeptide” as used herein is meant a starting polypeptide that is subsequently modified to generate a variant. The parent polypeptide may be a naturally occurring polypeptide, or a variant or engineered version of a naturally occurring polypeptide. Accordingly, by “parent immunoglobulin” as used herein is meant an unmodified immunoglobulin polypeptide that is modified to generate a variant, and by “parent antibody” as used herein is meant an unmodified antibody that is modified to generate a variant antibody. It should be noted that “parent antibody” includes known commercial, recombinantly produced antibodies as outlined below. In this context, a “parent Fc domain” will be relative to the recited variant; thus, a “variant human IgG1 Fc domain” is compared to the parent Fc domain of human IgG1, a “variant human IgG4 Fc domain” is compared to the parent Fc domain human IgG4, etc.

[0248] By “position” as used herein is meant a location in the sequence of a protein. Positions may be numbered sequentially, or according to an established format, for example the EU index for numbering of antibody domains (e.g., a CH1, CH2, CH3 or hinge domain).

[0249] By “target antigen” as used herein is meant the molecule that is bound specifically by the antigen-binding domain comprising the variable regions of a given antibody.

[0250] By “strandedness” in the context of the monomers of the heterodimeric antibodies of the invention herein is meant that, similar to the two strands of DNA that “match,” heterodimerization variants are incorporated into each monomer so as to preserve the ability to “match” to form heterodimers. For example, if some pI variants are engineered into monomer A (e.g., making the pI higher) then steric variants that are “charge pairs” that can be utilized as well do not interfere with the pI variants, e.g., the charge variants that make a pI higher are put on the same “strand” or “monomer” to preserve both functionalities. Similarly, for “skew” variants that come in pairs of a set as more fully outlined below, the skilled artisan will consider pI in deciding into which strand or monomer one set of the pair will go, such that pI separation is maximized using the pI of the skews as well.

[0251] By “target cell” as used herein is meant a cell that expresses a target antigen.

[0252] By “host cell” in the context of producing a bispecific antibody according to the invention herein is meant a cell that contains the exogeneous nucleic acids encoding the components of the bispecific antibody and is capable of expressing the bispecific antibody under suitable conditions. Suitable host cells are discussed below.

[0253] By “wild type” or “WT” herein is meant an amino acid sequence or a nucleotide sequence that is found in nature, including allelic variations. A WT protein has an amino acid sequence or a nucleotide sequence that has not been intentionally modified.

[0254] Provided herein are a number of antibody domains (e.g., Fc domains) that have sequence identity to human antibody domains. Sequence identity between two similar sequences (e.g., antibody variable domains) can be measured by algorithms such as that of Smith, T.F. & Waterman, M.S. (1981) “Comparison Of Biosequences,” Adv. Appl. Math. 2:482 [local homology algorithm]; Needleman, S.B. & Wunsch, CD. (1970) “A General Method Applicable To The Search For Similarities In The Amino Acid Sequence Of Two Proteins,” J. Mol. Biol. 48:443 [homology alignment algorithm], Pearson, W.R. & Lipman, D.J. (1988) “Improved Tools For Biological Sequence Comparison,” Proc. Natl. Acad. Sci. (U.S.A.) 85:2444 [search for similarity method]; or Altschul, S. F. et al, (1990) “Basic Local Alignment Search Tool,” J. Mol. Biol. 215:403-10, the “BLAST” algorithm, see blast.ncbi.nlm.nih.gov/Blast.cgi. When using any of the aforementioned algorithms, the default parameters (for Window length, gap penalty, etc.) are used. In one embodiment, sequence identity is done using the BLAST algorithm, using default parameters

[0255] The antibodies of the present invention are generally isolated or recombinant. “Isolated,” when used to describe the various polypeptides disclosed herein, means a polypeptide that has been identified and separated and/or recovered from a cell or cell culture from which it was expressed. Ordinarily, an isolated polypeptide will be prepared by at least one purification step. An “isolated antibody,” refers to an antibody which is substantially free of other antibodies having different antigenic specificities. “Recombinant” means the antibodies are generated using recombinant nucleic acid techniques in exogeneous host cells, and they can be isolated as well. This means that an antibody is typically at least 50% w/w pure of interfering proteins and other contaminants arising from its production or purification but does not exclude the possibility that the antibody is combined with an excess of pharmaceutical acceptable carrier(s) or other vehicle intended to facilitate its use. Sometimes antibodies are at least 60, 70, 80, 90, 95 or 99% w/w pure of interfering proteins and contaminants from production or purification. Often an antibody is the predominant macromolecular species remaining after its purification.

[0256] “Specific binding” or “specifically binds to” or is “specific for” a particular antigen or an epitope means binding that is measurably different from a non-specific interaction. Specific binding can be measured, for example, by determining binding of a molecule compared to binding of a control molecule, which generally is a molecule of similar structure that does not have binding activity. For example, specific binding can be determined by competition with a control molecule that is similar to the target.

[0257] Specific binding for a particular antigen or an epitope can be exhibited, for example, by an antibody having a KD for an antigen or epitope of at least about 10⁻⁴ M, at least about 10⁻⁵ M, at least about 10⁻⁶ M, at least about 10⁻⁷ M, at least about 10⁻⁸ M, at least about 10⁻⁹ M, alternatively at least about 10⁻¹⁰ M, at least about 10⁻¹¹ M, at least about 10⁻¹² M, or greater, where KD refers to a dissociation rate of a particular antibody-antigen interaction. Typically, an antibody that specifically binds an antigen will have a KD that is 20-, 50-, 100-, 500-, 1000-, 5,000-, 10,000- or more times greater for a control molecule relative to the antigen or epitope.

[0258] Also, specific binding for a particular antigen or an epitope can be exhibited, for example, by an antibody having a KA or Ka for an antigen or epitope of at least 20-, 50-, 100-, 500-, 1000-, 5,000-, 10,000- or more times greater for the epitope relative to a control, where KA or Ka refers to an association rate of a particular antibody-antigen interaction. Binding affinity is generally measured using a Biacore, SPR or BLI assay.

[0259] An antibody specifically binding to a target can also be referred to as an antibody against the target. Specific binding is detectably higher in magnitude and distinguishable from non-specific binding occurring to at least one unrelated target. Specific binding can be the result of formation of bonds between particular functional groups or particular spatial fit (e.g., lock and key type) whereas nonspecific binding is usually the result of van der Waals forces. Specific binding does not, however, necessarily imply that an antibody with the same two binding sites binds only one target or a bispecific antibody with two different binding sites binds only against targets for these two binding sites.

[0260] The term “subject” includes human and other mammalian subjects that receive either prophylactic or therapeutic treatment. Other mammalian subjects include animal models of a human condition (e.g., non-human primate or rodent, such as mouse or rat) and veterinary subjects.

[0261] Compositions or methods “comprising” one or more recited elements may include other elements not specifically recited. For example, a composition that comprises an antibody may contain the antibody alone or in combination with other ingredients.

### IV. Anti-TL1A Antibodies, Anti-IL23 Antibodies, and Anti-TL1A×Anti-IL23 Antibodies

[0262] In one aspect, provided herein are novel anti-TL1A×anti-IL23 antibodies. In another aspect, provided herein are novel anti-TL1A antibodies. In another aspect, provided herein are novel anti-IL23 antibodies. In another aspect, provided herein are combinations of an anti-TL1A antibody and an IL23 antibody.

[0263] The anti-TL1A×anti-IL23 antibodies are multivalent and include at least two antigen-binding domains (ABDs), wherein at least one antigen-binding domain is a TL1A binding domain and at least one antigen-binding domain is an IL23 binding domain (e.g., an IL23p19 binding domain). For example, at least one antigen-binding domain can be a human TL1A binding domain and at least one antigen-binding domain can be a human IL23 binding domain (e.g., a human IL23p19 binding domain). Any suitable TL1A binding domain and IL23 binding domain can be included in the subject anti-TL1A×anti-IL23 antibodies, including, for example, the TL1A binding domains and IL23 binding domains provided herein. Likewise, any suitable TL1A binding domain can be included in the subject anti-TL1A antibodies, including, for example, the TL1A binding domains provided herein. Likewise, any suitable IL23 binding domain can be included in the subject anti-IL23 antibodies, including, for example, the IL23 binding domains provided herein.

[0264] The antigen-binding domains provided herein generally include a variable heavy domain (VH) having a VH-CDR1, VH-CDR-2, and VH-CDR-3; and a variable light domain (VL), and a variable light domain (VL) having a VL-CDR1, VL-CDR-2, and VL-CDR-3.

[0265] In addition, as discussed above, the numbering used in the sequence listing and tables for the identification of the CDRs is Kabat, however, different numbering can be used, which will change the amino acid sequences of the CDRs as shown in Table 3.

[0266] For all of the variable heavy and light domains listed herein, further variants can be made. As outlined herein, in some embodiments the set of 6 CDRs can have from 0, 1, 2, 3, 4 or 5 amino acid modifications (with amino acid substitutions finding particular use), as well as changes in the framework regions of the variable heavy and light domains, as long as the frameworks (excluding the CDRs) retain at least about 80, 85, 90, 95 or 99% identity to a human germline sequence selected from those listed in FIG. 1 of U.S. Pat. No. 7,657,380, which Figure and Legend is incorporated by reference in its entirety herein. Thus, for example, the identical CDRs as described herein can be combined with different framework sequences from human germline sequences, as long as the framework regions retain at least 80, 85 or 90% identity to a human germline sequence selected from those listed in FIG. 1 of U.S. Pat. No. 7,657,380. Alternatively, the CDRs can have amino acid modifications (e.g., from 1, 2, 3, 4 or 5 amino acid modifications in the set of CDRs (that is, the CDRs can be modified as long as the total number of changes in the set of 6 CDRs is less than 6 amino acid modifications, with any combination of CDRs being changed; e.g., there may be one change in vlCDR1, two in vhCDR2, none in vhCDR3, etc.)), as well as having framework region changes, as long as the framework regions retain at least 80, 85, 95 to 99% identity to a human germline sequence selected from those listed in FIG. 1 of U.S. Pat. No. 7,657,380.

[0267] Any set of 6 CDRs or VH and VL domains can be in the scFv format or in the Fab format, which is then added to the heavy and light constant domains, where the heavy constant domains comprise variants (including within the CH1 domain as well as the Fc domain).

[0268] In addition, in embodiments wherein the subject antibody includes an scFv, the scFv can be in an orientation from N- to C-terminus of VH-scFv linker-VL or VL-scFv linker-VH. In some formats, one or more of the ABDs generally is a Fab that includes a VH domain on one protein chain (generally as a component of a heavy chain) and a VL on another protein chain (generally as a component of a light chain). Exemplary scFv linkers for use in the subject antibodies are depicted in Table 4. Table 4 depicts a number of charged scFv linkers that find use in increasing or decreasing the pI of the subject heterodimeric bispecific antibodies that utilize one or more scFv as a component, as described herein (e.g., anti-TL1A×anti-IL23 bsAbs). The (+H) positive linker finds particular use herein, particularly with anti-TL1A and anti-IL23 VL and VH sequences shown herein. A single prior art scFv linker with a single charge is referenced as “Whitlow,” from Whitlow et al., Protein Engineering 6(8):989-995 (1993). It should be noted that this linker was used for reducing aggregation and enhancing proteolytic stability in scFvs. Such charged scFv linkers can be used in any of the subject antibody formats disclosed herein that include scFvs (e.g., 1+1 Fab-scFv-Fc and 2+1 Fab2-scFv-Fc formats).

TABLE 4
Positively Charged scFv Linkers

| Name | Sequence | Length | Charge | |
|---|---|---|---|---|
| Gly-Ser 15 | GGGGSGGGGSGGGGS | 15 | 0 | SEQ ID NO: 7 |
| Whitlow linker | GSTSGSGKPGSGEGSTKG | 18 | +1 | SEQ ID NO: 8 |
| 6paxA_1 (+A) | IRPRAIGGSKPRVA | 14 | +4 | SEQ ID NO: 9 |
| +B | GKGGSGKGGSGKGGS | 15 | +3 | SEQ ID NO: 10 |
| +C | GGKGSGGKGSGGKGS | 15 | +3 | SEQ ID NO: 11 |
| +D | GGGKSGGGKSGGGKS | 15 | +3 | SEQ ID NO: 12 |
| +E | GKGKSGKGKSGKGKS | 15 | +6 | SEQ ID NO: 13 |
| +F | GGGKSGGKGSGKGGS | 15 | +3 | SEQ ID NO: 14 |
| +G | GKPGSGKPGSGKPGS | 15 | +3 | SEQ ID NO: 15 |
| +H | GKPGSGKPGSGKPGSGKPGS | 20 | +4 | SEQ ID NO: 16 |
| +I | GKGKSGKGKSGKGKSGKGKS | 20 | +8 | SEQ ID NO: 17 |

Negatively Charged scFv Linkers

| Name | Sequence | Length | Charge | |
|---|---|---|---|---|
| Gly-Ser 20 | GGGGSGGGGSGGGGSGGGGS | 20 | 0 | SEQ ID NO: 18 |
| 3hsc_2 (-A) | STAGDTHLGGEDFD | 14 | −4 | SEQ ID NO: 19 |
| −B | GEGGSGEGGSGEGGS | 15 | −3 | SEQ ID NO: 20 |
| −C | GGEGSGGEGSGGEGS | 15 | −3 | SEQ ID NO: 21 |
| −D | GGGESGGGESGGGES | 15 | −3 | SEQ ID NO: 22 |
| −E | GEGESGEGESGEGES | 15 | −6 | SEQ ID NO: 23 |
| −F | GGGESGGEGSGEGGS | 15 | −3 | SEQ ID NO: 24 |
| −G | GEGESGEGESGEGESGEGES | 20 | −8 | SEQ ID NO: 25 |

Additional scFv Linkers

| | |
|---|---|
| GGGGSGGGGSGGGGS | SEQ ID NO: 7 |
| GGGGSGGGGSGGGGSGGGGS | SEQ ID NO: 18 |
| GSTSGSGKPGSGEGSTKG | SEQ ID NO: 26 |
| PRGASKSGSASQTGSAPGS | SEQ ID NO: 27 |
| GTAAAGAGAAGGAAAGAAG | SEQ ID NO: 28 |
| GTSGSSGSGSGGSGSGGGG | SEQ ID NO: 29 |
| GKPGSGKPGSGKPGSGKPGS | SEQ ID NO: 16 |

[0269] In some embodiments, the anti-TL1A antibody is a monospecific antibody. In some embodiments, the anti-TL1A antibody is a bispecific antibody. In some embodiments, the anti-TL1A antibody is a bivalent antibody. In some embodiments, the anti-TL1A antibody is a trivalent antibody. In some embodiments, the anti-TL1A antibody is a bispecific, bivalent antibody.

[0270] In some embodiments, the anti-IL23 antibody is a monospecific antibody. In some embodiments, the anti-IL23 antibody is a bispecific antibody. In some embodiments, the anti-IL23 antibody is a bivalent antibody. In some embodiments, the anti-IL23 antibody is a trivalent antibody. In some embodiments, the anti-IL23 antibody is a bispecific, bivalent antibody.

[0271] In some embodiments, the anti-TL1A×anti-IL23 antibody is a bispecific antibody. In some embodiments, the TL1A binding domain is monovalent. In some embodiments, the IL23 binding domain is monovalent. In some embodiments, the TL1A binding domain and the IL23 binding domain are each monovalent. In some embodiments, the anti-TL1A×anti-IL23 antibody is a bivalent antibody. In some embodiments, the anti-TL1A×anti-IL23 antibody is a trivalent antibody. In some embodiments, the anti-TL1A×anti-IL23 antibody is a bispecific, bivalent antibody. In some embodiments, the anti-TL1A×anti-IL23 antibodies include one TL1A binding domain and one IL23 binding domain. In exemplary embodiments, the anti-TL1A×anti-IL23 antibody is a bispecific, trivalent antibody. In some embodiments, the anti-TL1A×anti-IL23 antibodies include one TL1A binding domain and two IL23 binding domains. In some embodiments, the anti-TL1A×anti-IL23 antibodies include one IL23 binding domain and two TL1A binding domains.

[0272] The anti-TL1A×anti-IL23 antibodies provided herein can be in any useful format, including, including, for example, canonical immunoglobulin, as well as the “1+1 Fab-scFv-Fc,” “2+2 “mAb-scFv,” “2+1 “mAb-scFv,” “2+1 Fab₂-scFv-Fc,” “2+1 Fab₂-Fc×scFv-Fc,” “1+1 common light chain,” and “2+1 common light chain” formats described herein (FIG. 1). Additional useful formats include, for example, the “OrthoFab” and “CrossMab” formats described herein (FIG. 1). Additional useful formats include, but are not limited to: “mAb-Fv,” “central-Fv,” “one-armed scFv-mAb,” “scFv-mAb,” “dual scFv,” and “trident” formats provided herein (see, e.g., FIG. 1). See also, US20180127501A1, which is incorporated by reference herein, particularly in pertinent part relating to antibody formats (see, e.g., FIG. 2). In some embodiments, the anti-TL1A×anti-IL23 antibodies are heterodimeric bispecific antibodies that include variant Fc domains having any of the heterodimerization skew variants, pI variants and/or ablation variants described herein. See, e.g., Table 5, which shows a particularly useful bispecific antibody platform for the anti-TL1A×anti-IL23 bsAbs of the invention. Although the platform is described in the context of the 1+1 Fab-scFv-Fc format, it can be adapted for use in other bispecific antibody formats.

TABLE 5

| Monomer 1 | Monomer 2 |
|---|---|
| ±Heterodimer skew | ±Heterodimer skew |
| variants S364K/E357Q | variants L368D/K370S |
| ±FcKO | ±FcKO |
| E233P/L234V/L235A/ | E233P/L234V/L235A/ |
| G236_/S267K | G236_/S267K |
| ±M428L/N434S for FcRn | ±M428L/N434S for FcRn |

[0273] Note that unless specified herein, the order of the antigen list in the name does not confer structure; that is an anti-IL23×anti-TL1A 1+1 Fab-scFv-Fc antibody can have the scFv bind to TL1A or IL23, although in some cases, the order specifies structure as indicated.

[0274] The anti-TL1A×anti-IL23 antibodies provided herein further include different antibody domains. As described herein, the antibodies described herein include different domains within the heavy and light chains, which can be overlapping as well. These domains include, but are not limited to, the Fc domain, the CH1 domain, the CH2 domain, the CH3 domain, the hinge domain, the heavy constant domain (CH1-hinge-Fc domain or CH1-hinge-CH2-CH3), the variable heavy domain, the variable light domain, the light constant domain, Fab domains and scFv domains.

[0275] As shown herein, there are a number of suitable linkers (for use as either domain linkers or scFv linkers) that can be used to covalently attach the recited domains (e.g., scFvs, Fabs, Fc domains, VH domains, VL domains, etc.), including traditional peptide bonds, generated by recombinant techniques. Exemplary linkers to attach domains of the subject antibody to each other are depicted in Table 6, which depicts a number of exemplary domain linkers. In some embodiments, these linkers find use linking a single-chain Fv to an Fc chain. In some embodiments, these linkers may be combined in any orientation. For example, a GGGGS linker may be combined with a “lower half hinge” linker at the N-terminus or at the C-terminus.

TABLE 6

| Name | Sequence | SEQ ID NO: |
|---|---|---|
| (GGGGS)₁ or GGGGS | GGGGS | SEQ ID NO: 31 |
| (GGGGS)₂ | GGGGSGGGGS | SEQ ID NO: 32 |
| (GGGGS)₃ | GGGGSGGGGSGGGGS | SEQ ID NO: 7 |
| (GGGGS)₄ | GGGGSGGGGSGGGGSGGGGS | SEQ ID NO: 18 |
| (GGGGS)₅ | GGGGSGGGGSGGGGSGGGGSGGGGS | SEQ ID NO: 33 |
| (GGGGS)₆ | GGGGSGGGGSGGGGSGGGGSGGGGSGGGGS | SEQ ID NO: 34 |
| (GGGGS)₇ | GGGGSGGGGSGGGGSGGGGSGGGGSGGGGSGGGGS | SEQ ID NO: 35 |
| (GGGGA)₁ or GGGGA | GGGGA | SEQ ID NO: 36 |
| (GGGGA)₂ | GGGGAGGGGA | SEQ ID NO: 37 |
| (GGGGA)₃ | GGGGAGGGGAGGGGA | SEQ ID NO: 38 |
| (GGGGA)₄ | GGGGAGGGGAGGGGAGGGGA | SEQ ID NO: 39 |
| (GGGGA)₅ | GGGGAGGGGAGGGGAGGGGAGGGGA | SEQ ID NO: 40 |
| (GGGGA)₆ | GGGGAGGGGAGGGGAGGGGAGGGGAGGGGA | SEQ ID NO: 41 |
| (GGGGA)₇ | GGGGAGGGGAGGGGAGGGGAGGGGAGGGGAGGGGA | SEQ ID NO: 42 |
| 30AA-linker | DPALVHQRPAPPGGGGSGGGGSGGGGSGGG | SEQ ID NO: 43 |
| (GKPGS)₁ or GKPGS | GKPGS | SEQ ID NO: 44 |
| (GKPGS)₅ | GKPGSGKPGSGKPGSGKPGSGKPGS | SEQ ID NO: 45 |
| (GKPGS)₆ | GKPGSGKPGSGKPGSGKPGSGKPGSGKPGS | SEQ ID NO: 46 |
| (GGGES)₁ or GGGES | GGGES | SEQ ID NO: 47 |
| “full hinge” | EPKSCDKTHTCPPCP | SEQ ID NO: 48 |
| “lower half hinge” | KTHTCPPCP | SEQ ID NO: 49 |
| “full hinge C220S variant” | EPKSSDKTHTCPPCP | SEQ ID NO: 50 |
| “flex lower half hinge” | GGGGSGGGGSKTHTCPPCP | SEQ ID NO: 51 |
| “charged lower half hinge1” | GKPGSGKPGSKTHTCPPCP | SEQ ID NO: 52 |
| “charged lower half hinge2” | GKPGSKTHTCPPCP | SEQ ID NO: 53 |
| “upper half hinge” | EPKSC | SEQ ID NO: 54 |
| “flex upper half hinge” | EPKSCGGGGSGGGGS | SEQ ID NO: 55 |
| “charged upper half hinge1” | EPKSCGKPGSGKPGS | SEQ ID NO: 56 |
| “charged upper half hinge2” | EPKSCGKPGS | SEQ ID NO: 57 |

[0276] In some embodiments, the linker peptide may predominantly include the following amino acid residues: Gly, Ser, Ala, or Thr. The linker peptide should have a length that is adequate to link two molecules in such a way that they assume the correct conformation relative to one another so that they retain the desired activity. In one embodiment, the linker is from about 1 to 50 amino acids in length, preferably about 1 to 30 amino acids in length. In one embodiment, linkers of 1 to 20 amino acids in length may be used, with from about 5 to about 10 amino acids finding use in some embodiments. Useful linkers include glycine-serine polymers, including for example (GS)n, (GSGGS)n, (GGGGS)n, and (GGGS)n, where n is an integer of at least one (and generally from 3 to 4), glycine-alanine polymers, alanine-serine polymers, and other flexible linkers. Alternatively, a variety of nonproteinaceous polymers, including but not limited to polyethylene glycol (PEG), polypropylene glycol, polyoxyalkylenes, or copolymers of polyethylene glycol and polypropylene glycol, may find use as linkers.

[0277] Other linker sequences may include any sequence of any length of CL/CH1 domain but not all residues of CL/CH1 domain; for example, the first 5-12 amino acid residues of the CL/CH1 domains. Linkers can be derived from immunoglobulin light chain, for example Cκ or Cλ. Linkers can be derived from immunoglobulin heavy chains of any isotype, including for example Cγ1, Cγ2, Cγ3, Cγ4, Cα1, Cα2, Cδ, Cε, and Cμ. Linker sequences may also be derived from other proteins such as Ig-like proteins (e.g., TCR, FcR, KR), hinge region-derived sequences, and other natural sequences from other proteins.

[0278] In some embodiments, the linker is a “domain linker,” used to link any two domains as outlined herein together. For example, in the 2+1 Fab₂-scFv-Fc format, there may be a domain linker that attaches the C-terminus of the CH1 domain of the Fab to the N-terminus of the scFv, with another optional domain linker attaching the C-terminus of the scFv to the CH2 domain (although in many embodiments the hinge is used as this domain linker). While any suitable linker can be used, many embodiments utilize a glycine-serine polymer as the domain linker, including for example (GS)n, (GSGGS)n, (GGGGS)n, and (GGGS)n, where n is an integer of at least one (and generally from 3 to 4 to 5) as well as any peptide sequence that allows for recombinant attachment of the two domains with sufficient length and flexibility to allow each domain to retain its biological function. In some cases, and with attention being paid to “strandedness,” as outlined below, charged domain linkers, as used in some embodiments of scFv linkers can be used. Exemplary useful domain linkers are depicted in Table 6.

[0279] In some embodiments, the linker is a scFv linker that is used to covalently attach the VH and VL domains as discussed herein. In many cases, the scFv linker is a charged scFv linker, a number of which are shown in Table 4. Accordingly, provided herein are charged scFv linkers, to facilitate the separation in pI between a first and a second monomer. That is, by incorporating a charged scFv linker, either positive or negative (or both, in the case of scaffolds that use scFvs on different monomers), this allows the monomer comprising the charged linker to alter the pI without making further changes in the Fc domains. These charged linkers can be substituted into any scFv containing standard linkers. Again, charged scFv linkers are used on the correct “strand” or monomer, according to the desired changes in pI. For example, as discussed herein, to make 1+1 Fab-scFv-Fc format heterodimeric antibody, the original pI of the Fv region for each of the desired antigen-binding domains are calculated, and one is chosen to make an scFv, and depending on the pI, either positive or negative linkers are chosen. Charged domain linkers can also be used to increase the pI separation of the monomers of the invention as well, and thus those included in Table 6 can be used in any embodiment herein where a linker is utilized.

[0280] In some embodiments, wherein an scFv is included in the anti-TL1A×anti-IL23 antibody (e.g., the 1+1 Fab-scFv-Fc format antibody), the scFv includes “staple” In exemplary embodiments wherein, such “stapled” scFvs include: a) a first disulfide bond between a structurally conserved surface exposed VH cysteine and a first scFv linker cysteine; b) a second disulfide bond between a structurally conserved surface exposed VL cysteine and a second scFv linker cysteine; or c) the first disulfide bond between the structurally conserved surface exposed VH cysteine and the first scFv linker cysteine and the second disulfide bond between the structurally considered surface exposed VL cysteine and the second scFv linker cysteine. Methods for making “stapled” scFvs are described in WO 2021/030657, which is incorporated by reference in its entirety, including pertinent parts relating to methods for making “stapled” scFvs, and “stapled” scFv compositions.

[0281] Exemplary subject anti-TL1A×anti-IL23 antibodies are depicted, for example, in Tables 44, 26, and 29-34. During the cell culture production of the anti-TL1A antibodies, the anti-IL23 antibodies, and the anti-TL1A×anti-TL23 antibodies provided herein, the C-terminal lysine residue or C-terminal lysine and glycine residues may be cleaved from the heavy chain monomers, thereby leading to variants with C-terminal “clipping.” See, e.g., Jiang et al., Journal of Pharmaceutical Sciences 105:2066-2072 (2016). Thus, in some embodiments provided herein, the anti-TL1A×anti-TL23 antibody is a variant of one of the anti-TL1A×anti-IL23 antibodies that includes a deletion of a C-terminal lysine (-K) or C-terminal lysine and glycine (-GK) residues in one or both Fc domains of an anti-TL1A×anti-IL23 antibody described herein. In some embodiments, the deletion is G446del and/or K447del (EU numbering). In some embodiments, the deletion is K447del (EU numbering). In some embodiments, the deletion is G446del and K447del (EU numbering). Likewise, in some embodiments provided herein, the anti-TL1A antibody is a variant of one of the anti-TL1A antibodies that includes a deletion of a C-terminal lysine (-K) or C-terminal lysine and glycine (-GK) residues in one or both Fc domains of an anti-TL1A antibody described herein. In some embodiments, the deletion is G446del and/or K447del (EU numbering). In some embodiments, the deletion is K447del (EU numbering). In some embodiments, the deletion is G446del and K447del (EU numbering). Likewise, in some embodiments provided herein, the anti-TL23 antibody is a variant of one of the anti-IL23 antibodies that includes a deletion of a C-terminal lysine (-K) or C-terminal lysine and glycine (-GK) residues in one or both Fc domains of an anti-TL23 antibody described herein. In some embodiments, the deletion is G446del and/or K447del (EU numbering). In some embodiments, the deletion is K447del (EU numbering). In some embodiments, the deletion is G446del and K447del (EU numbering).

[0282] Likewise, during production of the anti-TL1A antibodies, the anti-IL23 antibodies, and the anti-TL1A×anti-IL23 antibodies, glutamine or glutamate at the N-termini of heavy chain and/or light chain can cyclize spontaneously to pyroglutamate. See, e.g., Liu et al. (2011) J. Biol. Chem. 286(13):11211-11217 and Cao et al. (2022) J. Pharm. Sci. 111(2):335-344. Thus, in some embodiments provided herein, the anti-TL1A×anti-IL23 antibody is a variant of one of the anti-TL1A×anti-IL23 antibodies that includes a modification of an N-terminal glutamine or N-terminal glutamate to pyroglutamate in one or more or all of the heavy and light chains of an anti-TL1A×anti-IL23 antibody described herein. In some embodiments, one or both heavy chains of an anti-TL1A×anti-IL23 antibody described herein can include a deletion of a C-terminal lysine (-K) or C-terminal lysine and glycine (-GK) residues and a modification of an N-terminal glutamine or N-terminal glutamate to pyroglutamate. Likewise, in some embodiments provided herein, the anti-TL1A antibody is a variant of one of the anti-TL1A antibodies that includes a modification of an N-terminal glutamine or N-terminal glutamate to pyroglutamate in one or more or all of the heavy and light chains of an anti-TL1A antibody described herein. In some embodiments, one or both heavy chains of an anti-TL1A antibody described herein can include a deletion of a C-terminal lysine (-K) or C-terminal lysine and glycine (-GK) residues and a modification of an N-terminal glutamine or N-terminal glutamate to pyroglutamate. Likewise, in some embodiments provided herein, the anti-IL23 antibody is a variant of one of the anti-IL23 antibodies that includes a modification of an N-terminal glutamine or N-terminal glutamate to pyroglutamate in one or more or all of the heavy and light chains of an anti-IL23 antibody described herein. In some embodiments, one or both heavy chains of an anti-TL1A×anti-IL23 antibody described herein can include a deletion of a C-terminal lysine (-K) or C-terminal lysine and glycine (-GK) residues and a modification of an N-terminal glutamine or N-terminal glutamate to pyroglutamate.

[0283] Aspects of the anti-TL1A antibodies, anti-IL23 antibodies, and anti-TL1A×anti-IL23 antibodies are further described in detail below.

### A. TL1A Binding Domains

[0284] The anti-TL1A×anti-IL23 antibodies provided herein include at least one TL1A binding domain. Likewise, the anti-TL1A antibodies provided herein include at least one TLA1 binding domain. Any suitable TL1A binding domain can be included in the anti-TL1A×anti-IL23 antibodies or anti-TL1A antibodies provided herein. For example, the TL1A binding domain can be a human TL1A binding domain.

[0285] Suitable TL1A binding domains can comprise a set of 6 CDRs as depicted in the tables and sequences (see, e.g., Tables 44, 7-10, 22, 23, 26, 29-34, and 48, and VH sequences in SEQ ID NOS: 1427-1823 and 2316-2330 and VL sequences in SEQ ID NOS: 1824-1923, and VH/VL pairs set forth in SEQ ID NOS: 2331-2363), either as they are underlined or, in the case where a different numbering scheme is used as described herein and as shown in Table 3, as the CDRs that are identified using other alignments within the variable heavy (VH) domain and variable light domain (VL) sequences of those depicted in Tables 7-10 and 23 or in Tables 44, 7-10, 22, 23, 26, 29-34, and 48, and VH sequences in SEQ ID NOS: 1427-1823 and 2316-2330 and VL sequences in SEQ ID NOS: 1824-1923, and VH/VL pairs set forth in SEQ ID NOS: 2331-2363. Suitable TL1AABDs can also include the entire VH and VL sequences as depicted in these sequences and tables, used as scFvs or as Fabs. In some embodiments, the VH sequence includes 53Y (i.e., a Y at position 53) and/or 100V (i.e., a V at position 100) as numbered by Kabat. In some embodiments, the VH sequence includes 53Y and 100V. In some embodiments, the VL sequence includes 120Q (i.e., a Q at position 120) as numbered by Kabat.

[0286] In one embodiment, the TL1A antigen-binding domain (ABD) includes the 6 CDRs (i.e., vhCDR1-3 and vlCDR1-3) of any of the TL1A binding domains described herein, including the tables and sequences (see, e.g., Tables 44, 7-10, 22, 23, 26, 29-34, and 48, and VH sequences in SEQ ID NOS: 1427-1823 and 2316-2330 and VL sequences in SEQ ID NOS: 1824-1923, and VH/VL pairs set forth in SEQ ID NOS: 2331-2363, or see, e.g., Tables 7-10 and 23). In some embodiments, the TL1AABD is one of the following TL1AABDs: 70416_041[TL1a]_H1L1, 70417_111 [TL1a]_H1L1, 70392_069 [TL1a]_H1L1, 70392_189 [TL1a]_H1L1, 70416_092 [TL1a]_H1L1, 70392_201 [TL1a]_H1L1, 70416_073 [TL1a]_H1L1, 70392_074 [TL1a]_H1L1, 70416_094 [TL1a]_H1L1, 70392_292 [TL1a]_H1L1 (Tables 7-10). In some embodiments, the TL1AABD is a TL1AABD from Table 44 or 22. Tables 7-10 depict the variable heavy and variable light chain sequences for TL1A binding domains which find use in the invention. As noted herein and is true for every sequence herein containing CDRs, the exact identification of the CDR locations may be slightly different depending on the numbering used as is shown in Table 3, and thus included herein are not only the CDRs that are underlined but also CDRs included within the VH and VL domains using other numbering systems. Furthermore, as for all the sequences in the tables, these VH and VL sequences can be used either in a scFv format or in a Fab format.

TABLE 7
041[TL1a]_H1L1

| | Sequence | SEQ ID NO: |
|---|---|---|
| Variable | QVQLVQSGAEVKKPGASVKVSCKVSGFSVTSYNVHWVRQAPGQGLEWM | 101 |
| Heavy (vh) | GVMWSGGNTDYNSKFQGRVTMTRDTSTNTVYMELSSLRSEDTAVYYCA | |
| Domain | RAGRYYHDSNYYWDFPYWGQGTLVTVSS | |
| vhCDR1 | SYNVH | 102 |
| vhCDR2 | VMWSGGNTDYNSKFQG | 103 |
| vhCDR3 | AGRYYHDSNYYWDFPY | 104 |
| Variable Light | DIQMTQSPSSVSASVGDRVTITCRASEDIYSGLAWYQQKPGKSPKLLIYGA | 105 |
| (vl) Domain | SSLQDGVPSRFSGSGSGTDYTLTISSLQPEDFATYFCQEGLKSPYTFGAGTK | |
| | LEIK | |
| VlCDR1 | RASEDIYSGLA | 106 |
| VlCDR2 | GASSLQD | 107 |
| VlCDR3 | QEGLKSPYT | 108 |

111 [TL1a]_H1L1

| | Sequence | SEQ ID NO: |
|---|---|---|
| Variable | EVQLVESGGGLVQPGGSLRLSCAASGFTFSSFGMHWVRQAPGKGLEWVS | 109 |
| Heavy (vh) | YISSGSTTIYYADSVKGRFTISRDNAKNSLYLQMNSLRAEDTAVYYCARAP | |
| Domain | LLRGAMDYWGQGTLVTVSS | |
| vhCDR1 | SFGMH | 110 |
| vhCDR2 | YISSGSTTIYYADSVKG | 111 |
| vhCDR3 | APLLRGAMDY | 112 |
| Variable Light | DIVMTQSPDSLAVSLGERATINCKASQDVSTAVVWYQQKPGQSPKLLIYW | 113 |
| (vl) Domain | ASTRHTGVPDRFTGSGSGTDYTLTISSLQAEDVAVYHCQQHYSTPYTFGG | |
| | GTKLEIK | |
| VlCDR1 | KASQDVSTAVV | 114 |
| VlCDR2 | WASTRHT | 115 |
| VlCDR3 | QQHYSTPYT | 116 |

TABLE 8
069 [TL1a]_H1L1

| | Sequence | SEQ ID NO: |
|---|---|---|
| Variable | EVQLVESGGGLVQPGGSLKLSCAASGFDIIDDYIHWVRQASGKGLEWVGR | 117 |
| Heavy (vh) | IDPASANTKYVPSVKGRFTISADTSKNTAYLQMNSLKTEDTAVYYCTRKG | |
| Domain | FAYWGQGTLVTVSS | |
| vhCDR1 | DDYIH | 118 |
| vhCDR2 | RIDPASANTKYVPSVKG | 119 |
| vhCDR3 | KGFAY | 120 |
| Variable Light | NIVMTQTPLSLSVTPGQPASISCKASENVGTYVSWYLQKPGQSPQLLIYGT | 121 |
| (vl) Domain | SNRYTGVPDRFTGSGSATDFTLKISRVEAEDVGVYHCGQSYRYPYTFGGG | |
| | TKLEIK | |
| VlCDR1 | KASENVGTYVS | 122 |
| VlCDR2 | GTSNRYT | 123 |
| VlCDR3 | GOSYRYPYT | 124 |

189[TL1a]_H1L1

| | Sequence | SEQ ID NO: |
|---|---|---|
| Variable | QVQLVQSGAEVKKPGASVKVSCKASGYTFTDYEIHWMRQAPGQGLEWM | 125 |
| Heavy (vh) | GGIDPETGGTAYNQKFQGRVTMTADKSISTAYMELSRLRSDDTAVYYCTRF | |
| Domain | LVHHYAMDYWGQGTTVTVSS | |
| vhCDR1 | DYEIH | 126 |
| vhCDR2 | GIDPETGGTAYNQKFQG | 127 |
| vhCDR3 | FLVHHYAMDY | 128 |
| Variable Light | DVVMTQSPLSLPVTLGQPASISCRSSQSLLDSDGKTYLNWLQKRPGQSPRR | 129 |
| (vl) Domain | LIYLVSKLDSGVPDRFTGSGSGTDFTLKISRVEAEDVGVYYCWQGTQLPFT | |
| | FGAGTKLEIK | |
| VlCDR1 | RSSQSLLDSDGKTYLN | 130 |
| VlCDR2 | LVSKLDS | 131 |
| VlCDR3 | WQGTQLPFT | 132 |

092 [TL1a]_H1L1

| | Sequence | SEQ ID NO: |
|---|---|---|
| Variable | QVQLVQSGAEVKKPGASVKVSCKVSGFSLTNYGVSWVRQAPGQGLEWM | 133 |
| Heavy (vh) | GGIWGDGSTDYDSKFQGRVTMTRDTSTSTVYMELSSLRSEDTAVYFCTRY | |
| Domain | SSYTNWFVYWGQGTLVTVSS | |
| vhCDR1 | NYGVS | 134 |
| vhCDR2 | GIWGDGSTDYDSKFQG | 135 |
| vhCDR3 | YSSYTNWFVY | 136 |
| Variable Light | DIQMTQSPSSLSASVGDRVTITCRAREDIYNGLAWYQQKPGKSPKLLIYNA | 137 |
| (vl) Domain | NRLHTGVPSRFSGSGSGTDFTLTISSLQPEDFATYFCQQYYDYPLTFGSGTK | |
| | VEIK | |
| vlCDR1 | RAREDIYNGLA | 138 |
| VlCDR2 | NANRLHT | 139 |
| VlCDR3 | QQYYDYPLT | 140 |

TABLE 9
201 [TL1a]_H1L1

| | Sequence | SEQ ID NO: |
|---|---|---|
| Variable | QVQLVQSGAEVKKPGASVKVSCKASGYTFTDYYMDWVRQAPGQSLEW | 141 |
| Heavy (vh) | MGYIYPHTGRTDYNQKFQGRVTMTVDKSISTAYMELSRLRSDDTAVYFC | |
| Domain | ARDSNYYFDVWGAGTTVTVSS | |
| vhCDR1 | DYYMD | 142 |
| vhCDR2 | YIYPHTGRTDYNQKFQG | 143 |
| vhCDR3 | DSNYYFDV | 144 |
| Variable Light | DIVMTQSPLSLPVTPGEPASISCRASQNVRTAVAWYLQKPGQSPQALIYLA | 145 |
| (vl) Domain | SNRHTGVPDRFTGSGSGTDFTLKISRVEAEDVGVYFCLQHWNYPYTFGGG | |
| | TKLEIK | |
| VlCDR1 | RASQNVRTAVA | 146 |
| VlCDR2 | LASNRHT | 147 |
| VlCDR3 | LQHWNYPYT | 148 |

073 [TL1a]_H1L1

| | Sequence | SEQ ID NO: |
|---|---|---|
| Variable | QVQLVQSGAEVKKPGASVKVSCKVSGFSLNTYGVIWVRQAPGQGLEWM | 149 |
| Heavy (vh) | GVIWANGNTNYNSKLQGRVTMTRDTSTSTVYMELRSLRSDDTAVYFCAR | |
| Domain | ARYYYSGVLDYWGQGTLVTVSS | |
| vhCDR1 | TYGVI | 150 |
| vhCDR2 | VIWANGNTNYNSKLQG | 151 |
| vhCDR3 | ARYYYSGVLDY | 152 |
| Variable Light | DVVLTQSPLSLPVTLGQPASISCRSSQSLVHSDGNTYLDWYQQRPGQSPRL | 153 |
| (vl) Domain | LIYKVSNRFSGVPDRFIGSGSGSDFTLKISRVEAEDVGVYYCFQATHDPWAF | |
| | GGGTKVEIK | |
| VlCDR1 | RSSQSLVHSDGNTYLD | 154 |
| VlCDR2 | KVSNRFS | 155 |
| VlCDR3 | FQATHDPWA | 156 |

074 [TL1a]_H1L1

| | Sequence | SEQ ID NO: |
|---|---|---|
| Variable | QVQLVQSGAEVKKPGASVKVSCKASDFNIEDDYIHWVRQAPGQGLEWMG | 157 |
| Heavy (vh) | RIEPAGGNTKYAPKFQGRVTMTADTSINTAYMELSRLRSDDTAVYYCARKG | |
| Domain | FAYWGQGTLVTVSS | |
| vhCDR1 | DDYIH | 118 |
| vhCDR2 | RIEPAGGNTKYAPKFQG | 158 |
| vhCDR3 | KGFAY | 120 |
| Variable Light | KIVMTQSPDSLAVSLGERATINCKASENVGTYVSWYQQKPGQSPKLLIYGT | 159 |
| (vl) Domain | SNRYTGVPDRFTGSGSATDFTLTISSLQAEDVAVYHCGQSYSYPYTFGGGT | |
| | KLEIK | |
| VlCDR1 | KASENVGTYVS | 122 |
| VlCDR2 | GTSNRYT | 123 |
| VlCDR3 | GQSYSYPYT | 160 |

TABLE 10
094 [TL1a]_H1L1

| | Sequence | SEQ ID NO: |
|---|---|---|
| Variable | EVQLVESGGGLVKPGGSLRLSCAVSGFSLTSHSVSWVRQAPGKGPEWVG | 161 |
| Heavy (vh) | RMWYDGDTVYNSPVKGRFTISRDTSKNTLYLQMNSLKTEDTAVYYCTRN | |
| Domain | SRYYDVSYHRFVMDAWGQGTTVTVSS | |
| vhCDR1 | SHSVS | 162 |
| vhCDR2 | RMWYDGDTVYNSPVKG | 163 |
| vhCDR3 | NSRYYDVSYHRFVMDA | 164 |
| Variable Light | DTVLTQSPSSLSASVGDRVTITCRASESVSTGMHWYQQKPGKQPKLLIYG | 165 |
| (vl) Domain | ASNLESGVPARFSGSGSGTDFTLTISSLQPEDFATYFCQQSWSDPWTFGGG | |
| | TKVEIK | |
| VlCDR1 | RASESVSTGMH | 166 |
| VlCDR2 | GASNLES | 167 |
| VlCDR3 | QQSWSDPWT | 168 |

292 [TL1a]_H1L1

| | Sequence | SEQ ID NO: |
|---|---|---|
| Variable | QVQLVQSGAEVKKPGASVKVSCKASGYKFTDHYMDWVRQAPGQSLEW | 169 |
| Heavy (vh) | MGYIHPHTGRTSYNQKFQGRVTMTVDRSTNTAYMELSSLRSEDTAVYYCA | |
| Domain | RDSNYVNAVDYWGQGTLVTVSS | |
| vhCDR1 | DHYMD | 170 |
| vhCDR2 | YIHPHTGRTSYNQKFQG | 171 |
| vhCDR3 | DSNYVNAVDY | 172 |
| Variable Light | QVVLTQSPGTLSLSPGERATLSCRASSSVSSSYLHWYQQKPGQSPRLLIYST | 173 |
| (vl) Domain | SNLASGVPSRFSGSGSGTDYTLTISRLEPEDFAVYYCQQYDSSPSTFGSGTK | |
| | LEIK | |
| VlCDR1 | RASSSVSSSYLH | 174 |
| vlCDR2 | STSNLAS | 175 |
| VlCDR3 | QQYDSSPST | 176 |

[0287] In addition to the parental CDR sets disclosed in the tables and sequences that form the TL1A ABDs (see, e.g., Tables 44, 7-10, 22, 23, 26, 29-34, and 48, and VH sequences in SEQ TD NOS: 1427-1823 and 2316-2330 and VL sequences in SEQ TD NOS: 1824-1923, and VH/VL pairs set forth in SEQ ID NOS: 2331-2363, or see, e.g., Tables 7-10 and 23), provided herein are variant TL1A ABDs having CDRs that include at least one modification of the TL1A ABD CDRs disclosed herein (see, e.g., Tables 44, 7-10, 22, 23, 26, 29-34, and 48, and VH sequences in SEQ ID NOS: 1427-1823 and 2316-2330 and VL sequences in SEQ TD NOS: 1824-1923, and VH/VL pairs set forth in SEQ TD NOS: 2331-2363, or see, e.g., Tables 7-10 and 23). In one embodiment, the TL1A ABD includes a set of 6 CDRs with 1, 2, 3, 4, 5, 6, 7, 8, 9, 10 amino acid modifications as compared to the 6 CDRs of a TL1AABD as described herein, including the tables and sequences (see, e.g., Tables 44, 7-10, 22, 23, 26, 29-34, and 48, and VH sequences in SEQ TD NOS: 1427-1823 and 2316-2330 and VL sequences in SEQ ID NOS: 1824-1923, and VH/VL pairs set forth in SEQ TD NOS: 2331-2363, or see, e.g., Tables 7-10 and 23). That is, the CDRs can be modified as long as the total number of changes in the set of 6 CDRs is less than 11 amino acid modifications, with any combination of CDRs being changed (e.g., there may be one change in vlCDR1, two in vhCDR2, none in vhCDR3, etc.). In exemplary embodiments, the TL1AABD includes a set of 6 CDRs with 1, 2, 3, 4, 5, 6, 7, 8, 9, 10 amino acid modifications as compared to the 6 CDRs of one of the following TL1AABDs: 70416_041[TL1a]_H1L1, 70417_111 [TL1a]_H1L1, 70392_069 [TL1a]_H1L1, 70392_189 [TL1a]_H1L1, 70416_092 [TL1a]_H1L1, 70392_201 [TL1a]_H1L1, 70416_073 [TL1a]_H1L1, 70392_074 [TL1a]_H1L1, 70416_094 [TL1a]_H1L1, 70392_292 [TL1a]_H1L1 (Tables 7-10). In exemplary embodiments, the TL1AABD includes a set of 6 CDRs with 1, 2, 3, 4, 5, 6, 7, 8, 9, 10 amino acid modifications as compared to the 6 CDRs of a TL1AABD from Table 44 or 22. In certain embodiments, the TL1AABD is capable of binding TL1A antigen, as measured by at least one of a Biacore, surface plasmon resonance (SPR) and/or BLI (biolayer interferometry, e.g., Octet assay) assay, with the latter finding particular use in many embodiments. In particular embodiments, the TL1A ABD is capable of binding human TL1A antigen (see SEQ ID NO: 4). In some embodiments, the VH sequence includes 53Y (i.e., a Y at position 53) and/or 100V (i.e., a V at position 100) as numbered by Kabat. In some embodiments, the VH sequence includes 53Y and 100V. In some embodiments, the VL sequence includes 120Q (i.e., a Q at position 120) as numbered by Kabat.

[0288] In some embodiments, the TL1AABD of the subject anti-TL1A antibody or anti-TL1A×anti-IL23 antibody includes 6 CDRs that are at least 90, 95, 97, 98, or 99% identical to the 6 CDRs of a TL1AABD as described herein, including the tables and sequences (see, e.g., Tables 44, 7-10, 22, 23, 26, 29-34, and 48, and VH sequences in SEQ ID NOS: 1427-1823 and 2316-2330 and VL sequences in SEQ ID NOS: 1824-1923, and VH/VL pairs set forth in SEQ ID NOS: 2331-2363, or see, e.g., Tables 7-10 and 23). In exemplary embodiments, the TL1AABD includes 6 CDRs that are at least 90, 95, 97, 98, or 99% identical to the 6 CDRs of one of the following TL1AABDs: 70416_041[TL1a]_H1L1, 70417111 [TL1a]_H1L1, 70392_069 [TL1a]_H1L1, 70392_189 [TL1a]_H1L1, 70416_092 [TL1a]_H1L1, 70392_201 [TL1a]_H1L1, 70416_073 [TL1a]_H1L1, 70392_074 [TL1a]_H1L1, 70416_094 [TL1a]_H1L1, 70392_292 [TL1a]_H1L1 (Tables 7-10). In exemplary embodiments, the TL1AABD includes 6 CDRs that are at least 90, 95, 97, 98, or 99% identical to the 6 CDRs of a TL1AABD in Table 44 or 22. In certain embodiments, the TL1A ABD is capable of binding TL1A antigen, as measured by at least one of a Biacore, surface plasmon resonance (SPR) and/or BLI (biolayer interferometry, e.g., Octet assay) assay, with the latter finding particular use in many embodiments. In particular embodiments, the TL1a ABD is capable of binding human TL1A antigen (see SEQ ID NO: 4). In some embodiments, the VH sequence includes 53Y (i.e., a Y at position 53) and/or 100V (i.e., a V at position 100) as numbered by Kabat. In some embodiments, the VH sequence includes 53Y and 100V. In some embodiments, the VL sequence includes 120Q (i.e., a Q at position 120) as numbered by Kabat.

[0289] In another exemplary embodiment, the TL1AABD of the subject anti-TL1a×anti-IL23 antibody includes the variable heavy (VH) domain and variable light (VL) domain of any one of the TL1AABDs described herein, including the tables and sequences (see, e.g., Tables 44, 7-10, 22, 23, 26, 29-34, and 48, and VH sequences in SEQ ID NOS: 1427-1823 and 2316-2330 and VL sequences in SEQ ID NOS: 1824-1923, and VH/VL pairs set forth in SEQ ID NOS: 2331-2363 or see, e.g., Tables 7-10 and 23). In exemplary embodiments, the TL1AABD is one of the following TL1AABDs: 70416_041[TL1a]_H1L1, 70417_111 [TL1a]_H1L1, 70392_069 [TL1a]_H1L1, 70392_189 [TL1a]_H1L1, 70416_092 [TL1a]_H1L1, 70392_201 [TL1a]_H1L1, 70416_073 [TL1a]_H1L1, 70392_074 [TL1a]_H1L1, 70416_094 [TL1a]_H1L1, 70392_292 [TL1a]_H1L1 (Tables 7-10). In exemplary embodiments, the TL1AABD is a TL1AABD from Table 44 or Table 22.

[0290] In some embodiments, the anti-TL1A×anti-IL23 antibody includes a TL1A ABD that includes a variable heavy domain and/or a variable light domain that are variants of a TL1AABD VH and VL domain disclosed herein (see, e.g., Tables 44, 7-10, 22, 23, 26, 29-34, and 48, and VH sequences in SEQ ID NOS: 1427-1823 and 2316-2330 and VL sequences in SEQ ID NOS: 1824-1923, and VH/VL pairs set forth in SEQ ID NOS: 2331-2363, or see, e.g., Tables 7-10 and 23). In one embodiment, the variant VH domain and/or VL domain has from 1, 2, 3, 4, 5, 6, 7, 8, 9 or 10 amino acid changes from a VH and/or VL domain of a TL1AABD described herein, including the tables and sequences (see, e.g., Tables 44, 7-10, 22, 23, 26, 29-34, and 48, and VH sequences in SEQ ID NOS: 1427-1823 and 2316-2330 and VL sequences in SEQ ID NOS: 1824-1923, and VH/VL pairs set forth in SEQ ID NOS: 2331-2363, or see, e.g., Tables 7-10 and 23). In some embodiments, the variant VH domain and/or VL domain includes 1, 2, 3, 4, 5, 6, 7, 8, 9 or 10 amino acid changes in a framework region (e.g., FR1, FR2, FR3, or FR4) from a VH and/or VL domain of a TL1AABD described herein, including the tables and sequences (see, e.g., Tables 44, 7-10, 22, 23, 26, 29-34, and 48, and VH sequences in SEQ ID NOS: 1427-1823 and 2316-2330 and VL sequences in SEQ ID NOS: 1824-1923, and VH/VL pairs set forth in SEQ ID NOS: 2331-2363, or see, e.g., Tables 7-10 and 23). In some embodiments, the variant VH and/or VL domain does not have any changes in the CDRs from a VH and/or VL domain of a TL1A ABD described herein but has changes in a framework region. In some embodiments, the variant VH and/or VL domain includes 1, 2, 3, 4, 5, 6, 7, 8, 9 or 10 amino acid changes in a framework region (e.g., FR1, FR2, FR3, or FR4) from a VH and/or VL domain of a TL1A ABD described herein, wherein the changes are amino acid substitutions at one, two, three, or more of the following residues: (a) rare framework residues that differ between the murine antibody framework (i.e., donor antibody framework) and the human antibody framework (i.e., acceptor antibody framework); (b) Vernier zone residues when differing between donor antibody framework and acceptor antibody framework; (c) interchain packing residues at the VH/VL interface that differ between the donor antibody framework and the acceptor antibody framework; (d) canonical residues which differ between the donor antibody framework and the acceptor antibody framework sequences, particularly the framework regions crucial for the definition of the canonical class of the murine antibody CDR loops; (e) residues that are adjacent to a CDR; (g) residues capable of interacting with the antigen; (h) residues capable of interacting with the CDR; and (i) contact residues between the VH domain and the VL domain. In some embodiments, the substitutions are residues that are adjacent to a CDR, residues capable of interacting with the antigen, or residues capable of interacting with the CDR. In exemplary embodiments, the variant VH domain and/or VL domain has from 1, 2, 3, 4, 5, 6, 7, 8, 9 or 10 amino acid changes from a VH and/or VL domain of one of the following TL1AABDs: 70416_041[TL1a]_H1L1, 70417_111 [TL1a]_H1L1, 70392_069 [TL1a]_H1L1, 70392_189 [TL1a]_H1L1, 70416_092 [TL1a]_H1L1, 70392_201 [TL1a]_H1L1, 70416_073 [TL1a]_H1L1, 70392_074 [TL1a]_H1L1, 70416_094 [TL1a]_H1L1, 70392_292 [TL1a]_H1L1 (Tables 7-10). In exemplary embodiments, the variant VH domain and/or VL domain has from 1, 2, 3, 4, 5, 6, 7, 8, 9 or 10 amino acid changes from a VH and/or VL domain of a TL1AABD in Table 44 or 22. In exemplary embodiments, the variant VH domain and/or VL domain has from 1, 2, 3, 4, 5, 6, 7, 8, 9 or 10 amino acid changes in a framework region (e.g., FR1, FR2, FR3, or FR4) of the VH and/or VL domain of one of the following TL1AABDs: 70416_041[TL1a]_H1L1, 70417_111 [TL1a]_H1L1, 70392_069 [TL1a]_H1L1, 70392_189 [TL1a]_H1L1, 70416_092 [TL1a]_H1L1, 70392_201 [TL1a]_H1L1, 70416_073 [TL1a]_H1L1, 70392_074 [TL1a]_H1L1, 70416_094 [TL1a]_H1L1, 70392_292 [TL1a]_H1L1 (Tables 7-10). In exemplary embodiments, the variant VH domain and/or VL domain has from 1, 2, 3, 4, 5, 6, 7, 8, 9 or 10 amino acid changes in a framework region (e.g., FR1, FR2, FR3, or FR4) of the VH and/or VL domain of a TL1AABD in Table 44 or 22. In certain embodiments, the TL1A ABD is capable of binding to TL1A, as measured at least one of a Biacore, surface plasmon resonance (SPR) and/or BLI (biolayer interferometry, e.g., Octet assay) assay, with the latter finding particular use in many embodiments. In particular embodiments, the TL1AABD is capable of binding human TL1A antigen (see SEQ ID NO: 4). In some embodiments, the VH sequence includes 53Y (i.e., a Y at position 53) and/or 100V (i.e., a V at position 100) as numbered by Kabat. In some embodiments, the VH sequence includes 53Y and 100V. In some embodiments, the VL sequence includes 120Q (i.e., a Q at position 120) as numbered by Kabat.

[0291] In one embodiment, the variant VH and/or VL domain is at least 90, 95, 97, 98 or 99% identical to the VH and/or VL of a TL1AABD as described herein, including the tables and sequences (see, e.g., Tables 44, 7-10, 22, 23, 26, 29-34, and 48, and VH sequences in SEQ ID NOS: 1427-1823 and 2316-2330 and VL sequences in SEQ ID NOS: 1824-1923, and VH/VL pairs set forth in SEQ ID NOS: 2331-2363, or see, e.g., Tables 7-10 and 23). In exemplary embodiments, the variant VH and/or VL domain is at least 90, 95, 97, 98 or 99% identical to the VH and/or VL of one of the following TL1AABDs: 70416_041[TL1a]_H1L1, 70417_111 [TL1a]_H1L1, 70392_069 [TL1a]_H1L1, 70392_189 [TL1a]_H1L1, 70416_092 [TL1a]_H1L1, 70392_201 [TL1a]_H1L1, 70416_073 [TL1a]_H1L1, 70392_074 [TL1a]_H1L1, 70416_094 [TL1a]_H1L1, 70392_292 [TL1a]_H1L1 (Tables 7-10). In exemplary embodiments, the variant VH and/or VL domain is at least 90, 95, 97, 98 or 99% identical to the VH and/or VL of a TL1AABD in Table 44 or 22. In some embodiments, the variant VH and/or VL domain does not have any changes in the CDRs from a VH and/or VL domain of a TL1AABD described herein but has changes in a framework region. In some embodiments, the variant VH and/or VL domain includes amino acid changes in a framework region (e.g., FR1, FR2, FR3, or FR4) from a VH and/or VL domain of a TL1AABD described herein, wherein the changes are amino acid substitutions at one, two, three, or more of the following residues: (a) rare framework residues that differ between the murine antibody framework (i.e., donor antibody framework) and the human antibody framework (i.e., acceptor antibody framework); (b) Vernier zone residues when differing between donor antibody framework and acceptor antibody framework; (c) interchain packing residues at the VH/VL interface that differ between the donor antibody framework and the acceptor antibody framework; (d) canonical residues which differ between the donor antibody framework and the acceptor antibody framework sequences, particularly the framework regions crucial for the definition of the canonical class of the murine antibody CDR loops; (e) residues that are adjacent to a CDR; (g) residues capable of interacting with the antigen; (h) residues capable of interacting with the CDR; and (i) contact residues between the VH domain and the VL domain. In some embodiments, the substitutions are residues that are adjacent to a CDR, residues capable of interacting with the antigen, or residues capable of interacting with the CDR. In certain embodiments, the TL1A ABD is capable of binding to TL1A, as measured by at least one of a Biacore, surface plasmon resonance (SPR) and/or BLI (biolayer interferometry, e.g., Octet assay) assay, with the latter finding particular use in many embodiments. In particular embodiments, the TL1AABD is capable of binding human TL1A antigen (see SEQ ID NO: 4). In some embodiments, the VH sequence includes 53Y (i.e., a Y at position 53) and/or 100V (i.e., a V at position 100) as numbered by Kabat. In some embodiments, the VH sequence includes 53Y and 100V. In some embodiments, the VL sequence includes 120Q (i.e., a Q at position 120) as numbered by Kabat.

[0292] In some embodiments, a TL1A binding domain comprises a variable heavy domain comprising a vhCDR1, a vhCDR2, and a vhCDR3 contained within a variable heavy domain comprising the amino acid sequence of any one of SEQ ID NOS: 2241, 2253, 2259, 1674, and 1200, and a variable light domain comprising a vlCDR1, a vlCDR2, and a vlCDR3 contained within a variable light domain comprising the amino acid sequence of any one of SEQ ID NOS: 2243 and 1204. In some embodiments, a TL1A binding domain comprises a variable heavy domain comprising a vhCDR1, a vhCDR2, and a vhCDR3 contained within a variable heavy domain comprising the amino acid sequence of SEQ ID NO: 2241, and a variable light domain comprising a vlCDR1, a vlCDR2, and a vlCDR3 contained within a variable light domain comprising the amino acid sequence of SEQ ID NO: 2243. In some embodiments, a TL1A binding domain comprises a variable heavy domain comprising a vhCDR1, a vhCDR2, and a vhCDR3 contained within a variable heavy domain comprising the amino acid sequence of SEQ ID NO: 2253, and a variable light domain comprising a vlCDR1, a vlCDR2, and a vlCDR3 contained within a variable light domain comprising the amino acid sequence of SEQ ID NO: 2243. In some embodiments, a TL1A binding domain comprises a variable heavy domain comprising a vhCDR1, a vhCDR2, and a vhCDR3 contained within a variable heavy domain comprising the amino acid sequence of SEQ ID NO: 2259, and a variable light domain comprising a vlCDR1, a vlCDR2, and a vlCDR3 contained within a variable light domain comprising the amino acid sequence of SEQ ID NO: 2243. In some embodiments, a TL1A binding domain comprises a variable heavy domain comprising a vhCDR1, a vhCDR2, and a vhCDR3 contained within a variable heavy domain comprising the amino acid sequence of SEQ ID NO: 1674, and a variable light domain comprising a vlCDR1, a vlCDR2, and a vlCDR3 contained within a variable light domain comprising the amino acid sequence of SEQ ID NO: 1204. In some embodiments, a TL1A binding domain comprises a variable heavy domain comprising a vhCDR1, a vhCDR2, and a vhCDR3 contained within a variable heavy domain comprising the amino acid sequence of SEQ ID NO: 1200, and a variable light domain comprising a vlCDR1, a vlCDR2, and a vlCDR3 contained within a variable light domain comprising the amino acid sequence of SEQ ID NO: 1204. In some embodiments, a TL1A binding domain comprises a variable heavy domain comprising a vhCDR1, a vhCDR2, and a vhCDR3 contained within a variable heavy domain comprising the amino acid sequence of any one of SEQ ID NOS: 1674, 1200, 1661, and 2323, and a variable light domain comprising a vlCDR1, a vlCDR2, and a vlCDR3 contained within a variable light domain comprising the amino acid sequence of SEQ ID NO: 1204. In some embodiments, a TL1A binding domain comprises a variable heavy domain comprising a vhCDR1, a vhCDR2, and a vhCDR3 contained within a variable heavy domain comprising the amino acid sequence of SEQ ID NO: 1200, and a variable light domain comprising a vlCDR1, a vlCDR2, and a vlCDR3 contained within a variable light domain comprising the amino acid sequence of SEQ ID NO: 1204. In some embodiments, a TL1A binding domain comprises a variable heavy domain comprising a vhCDR1, a vhCDR2, and a vhCDR3 contained within a variable heavy domain comprising the amino acid sequence of SEQ ID NO: 1661, and a variable light domain comprising a vlCDR1, a vlCDR2, and a vlCDR3 contained within a variable light domain comprising the amino acid sequence of SEQ ID NO: 1204. In some embodiments, a TL1A binding domain comprises a variable heavy domain comprising a vhCDR1, a vhCDR2, and a vhCDR3 contained within any pair of anti-TL1A variable heavy domain and variable light domain in XENP53412, XENP53413, XENP53369, XENP53375, XENP53387, XENP53415, XENP53370, XENP53371, XENP53376, XENP53377, XENP53378, XENP53379, XENP53380, or XENP53414. In some embodiments, a TL1A binding domain comprises a variable heavy domain comprising a vhCDR1, a vhCDR2, and a vhCDR3 contained within a variable heavy domain comprising a vhCDR1, a vhCDR2, and a vhCDR3 contained within a variable heavy domain comprising the amino acid sequence of any one of SEQ ID NOS: 1427-1823 and 2316-2330, and a variable light domain comprising a vlCDR1, a vlCDR2, and a vlCDR3 contained within a variable light domain comprising the amino acid sequence of any one of SEQ ID NOS: 1824-1923. In some embodiments, a TL1A binding domain comprises a variable heavy domain comprising a vhCDR1, a vhCDR2, and a vhCDR3 contained within a variable heavy domain comprising the amino acid sequence of SEQ ID NO: 2323, and a variable light domain comprising a vlCDR1, a vlCDR2, and a vlCDR3 contained within a variable light domain comprising the amino acid sequence of SEQ ID NO: 1204. In some embodiments, the CDRs are as defined by Kabat. In other embodiments, the CDRs are as defined by Chothia, Kabat+Chothia, AbM, contact, or IMGT. In some embodiments, a TL1A binding domain comprises a vhCDR1 comprising the amino acid sequence of SEQ ID NO: 102 or 1201, a vhCDR2 comprising the amino acid sequence of SEQ ID NO: 1924 or 1202, a vhCDR3 comprising the amino acid sequence of SEQ ID NO: 1203 or 104, a vlCDR1 comprising the amino acid sequence of SEQ ID NO: 106, a vlCDR2 comprising the amino acid sequence of SEQ ID NO: 107, and a vlCDR3 comprising the amino acid sequence of SEQ ID NO: 108. In some embodiments, a TL1A binding domain comprises a vhCDR1 comprising the amino acid sequence of SEQ ID NO: 102, a vhCDR2 comprising the amino acid sequence of SEQ ID NO: 1924, a vhCDR3 comprising the amino acid sequence of SEQ ID NO: 1203, a vlCDR1 comprising the amino acid sequence of SEQ ID NO: 106, a vlCDR2 comprising the amino acid sequence of SEQ ID NO: 107, and a vlCDR3 comprising the amino acid sequence of SEQ ID NO: 108. In some embodiments, a TL1A binding domain comprises a vhCDR1 comprising the amino acid sequence of SEQ ID NO: 1201, a vhCDR2 comprising the amino acid sequence of SEQ ID NO: 1202, a vhCDR3 comprising the amino acid sequence of SEQ ID NO: 1203, a vlCDR1 comprising the amino acid sequence of SEQ ID NO: 106, a vlCDR2 comprising the amino acid sequence of SEQ ID NO: 107, and a vlCDR3 comprising the amino acid sequence of SEQ ID NO: 108. In some embodiments, a TL1A binding domain comprises a vhCDR1 comprising the amino acid sequence of SEQ ID NO: 102, a vhCDR2 comprising the amino acid sequence of SEQ ID NO: 1924, a vhCDR3 comprising the amino acid sequence of SEQ ID NO: 104, a vlCDR1 comprising the amino acid sequence of SEQ ID NO: 106, a vlCDR2 comprising the amino acid sequence of SEQ ID NO: 107, and a vlCDR3 comprising the amino acid sequence of SEQ ID NO: 108. In some embodiments, a TL1A binding domain comprises a vhCDR1 comprising the amino acid sequence of SEQ ID NO: 102, a vhCDR2 comprising the amino acid sequence of SEQ ID NO: 1926, a vhCDR3 comprising the amino acid sequence of SEQ ID NO: 104, a vlCDR1 comprising the amino acid sequence of SEQ ID NO: 106, a vlCDR2 comprising the amino acid sequence of SEQ ID NO: 107, and a vlCDR3 comprising the amino acid sequence of SEQ ID NO: 108. In some embodiments, a TL1A binding domain comprises a set of 6 CDRs with 1, 2, 3, 4, 5, 6, 7, 8, 9, 10 amino acid modifications as compared to the 6 CDRs of any of the above TL1A binding domains. That is, the CDRs can be modified as long as the total number of changes in the set of 6 CDRs is less than 11 amino acid modifications, with any combination of CDRs being changed (e.g., there may be one change in vlCDR1, two in vhCDR2, none in vhCDR3, etc.). In some embodiments, a TL1A binding domain comprises a set of 6 CDRs that are at least 90, 95, 97, 98 or 99% identical to the 6 CDRs of any of the above TL1A binding domains. In some embodiments, the VH sequence includes 53Y (i.e., a Y at position 53) and/or 100V (i.e., a V at position 100) as numbered by Kabat. In some embodiments, the VH sequence includes 53Y and 100V. In some embodiments, the VL sequence includes 120Q (i.e., a Q at position 120) as numbered by Kabat. In certain embodiments, the TL1A binding domain is capable of binding to TL1A, as measured at least one of a Biacore, surface plasmon resonance (SPR) and/or BLI (biolayer interferometry, e.g., Octet assay) assay, with the latter finding particular use in many embodiments. In particular embodiments, the TL1a ABD is capable of binding human TL1A antigen (see SEQ ID NO: 4). In particular embodiments, the antibody specifically binds human TL1A with a K_{D} of less than about 6.5E-11 M, less than about 6.4 E-11 M, or less than about 6.3E-11 as measured by surface plasmon resonance at 25° C., optionally wherein the antibody specifically binds human TL1A with a K_{D} of less than about 3E-11 M, less than about 2.9E-11 M, less than about 2.8E-11 M, or less than about 2.7E-11 M. In some embodiments, an antibody disclosed herein specifically binds human TL1A with a K_{D} of between about 2E-11 M and about 7E-11M, between about 2.5E-11 M and about 7E-11 M, or between about 2.5E-11 M and about 6.5E-11 M as measured by surface plasmon resonance or Biacore at 25° C. In some embodiments, an antibody disclosed herein specifically binds human TL1A with a K_{D} of between about 2.5E-11 M and about 3.5E-11 M, between about 2.5E-11 M and about 3E-11 M, or between about 2.5E-11 M and about 2.7E-11 M as measured by surface plasmon resonance or Biacore at 25° C. In particular embodiments, the antibody the antibody inhibits TL1A activity in a TL1A luciferase reporter assay with an IC₅₀ of less than about 4.5 nM. In some embodiments, an antibody disclosed herein inhibits TL1A activity in a TL1A luciferase reporter assay with an IC₅₀ of between about 2.5 nM and about 4.5 nM, between about 3.5 nM and about 5.5 nM, or between about 4 nM and about 5 nM.

[0293] In some embodiments, the variable heavy domain comprises the amino acid sequence of any one of SEQ ID NOS: 2241, 2253, 2259, 1674, and 1200, and the variable light domain comprises the amino acid sequence of any one of SEQ ID NOS: 2243 and 1204. In some embodiments, the variable heavy domain comprises the amino acid sequence of SEQ ID NO: 2241, and the variable light domain comprises the amino acid sequence of SEQ ID NO: 2243. In some embodiments, the variable heavy domain comprises the amino acid sequence of SEQ ID NO: 2253, and the variable light domain comprises the amino acid sequence of SEQ ID NO: 2243. In some embodiments, the variable heavy domain comprises the amino acid sequence of SEQ ID NO: 2259, and the variable light domain comprises the amino acid sequence of SEQ ID NO: 2243. In some embodiments, the variable heavy domain comprises the amino acid sequence of SEQ ID NO: 1674, and the variable light domain comprises the amino acid sequence of SEQ ID NO: 1204. In some embodiments, the variable heavy domain comprises the amino acid sequence of SEQ ID NO: 1200, and the variable light domain comprises the amino acid sequence of SEQ ID NO: 1204. In some embodiments, the variable heavy domain comprises the amino acid sequence of any one of SEQ ID NOS: 1427-1823 and 2316-2330, and the variable light domain comprises the amino acid sequence of any one of SEQ ID NOS: 1824-1923. In some embodiments, the variable heavy domain comprises the amino acid sequence of any one of SEQ ID NOS: 1674, 1200, 1661, and 2323, and the variable light domain comprises the amino acid sequence of SEQ ID NO: 1204. In some embodiments, the variable heavy domain comprises the amino acid sequence of SEQ ID NO: 1200, and the variable light domain comprises the amino acid sequence of SEQ ID NO: 1204. In some embodiments, the variable heavy domain comprises the amino acid sequence of SEQ ID NO: 1661, and the variable light domain comprises the amino acid sequence of SEQ ID NO: 1204. In some embodiments, the variable heavy domain comprises the amino acid sequence of SEQ ID NO: 2323, and the variable light domain comprises the amino acid sequence of SEQ ID NO: 1204. In some embodiments, the variable heavy domain and the variable light domain comprise the pair of anti-TL1A variable heavy domain and variable light domain in XENP53412, XENP53413, XENP53369, XENP53375, XENP53387, XENP53415, XENP53370, XENP53371, XENP53376, XENP53377, XENP53378, XENP53379, XENP53380, or XENP53414. In some embodiments, the variable heavy domain and the variable light domain comprise any pair of anti-TL1A variable heavy domain and variable light domain in Table 29 or 33. In some such antibodies, the variable heavy domain or the variable light domain can comprise variants of any of the above in which an N-terminal glutamine or glutamate is replaced with pyroglutamate. In some embodiments, the TL1A binding domain comprises a variant VH domain and/or variant VL domain having 1, 2, 3, 4, 5, 6, 7, 8, 9 or 10 amino acid changes from any of the above VH and VL domains. In some embodiments, the TL1A binding domain comprises a variant VH domain and/or variant VL domain at least 90%, 95%, 97%, 98%, or 99% identical to any of the above VH and VL domains. In some embodiments, the variant VH domain and/or VL domain has amino acid changes in a framework region (e.g., FR1, FR2, FR3, or FR4) but not in a CDR. In some embodiments, the changes are amino acid substitutions at one, two, three, or more of the following residues: (a) rare framework residues that differ between the murine antibody framework (i.e., donor antibody framework) and the human antibody framework (i.e., acceptor antibody framework); (b) Vernier zone residues when differing between donor antibody framework and acceptor antibody framework; (c) interchain packing residues at the VH/VL interface that differ between the donor antibody framework and the acceptor antibody framework; (d) canonical residues which differ between the donor antibody framework and the acceptor antibody framework sequences, particularly the framework regions crucial for the definition of the canonical class of the murine antibody CDR loops; (e) residues that are adjacent to a CDR; (g) residues capable of interacting with the antigen; (h) residues capable of interacting with the CDR; and (i) contact residues between the VH domain and the VL domain. In some embodiments, the substitutions are residues that are adjacent to a CDR, residues capable of interacting with the antigen, or residues capable of interacting with the CDR. In some embodiments, the VH sequence includes 53Y (i.e., a Y at position 53) and/or 100V (i.e., a V at position 100) as numbered by Kabat. In some embodiments, the VH sequence includes 53Y and 100V. In some embodiments, the VL sequence includes 120Q (i.e., a Q at position 120) as numbered by Kabat. In certain embodiments, the TL1A binding domain is capable of binding to TL1A, as measured at least one of a Biacore, surface plasmon resonance (SPR) and/or BLI (biolayer interferometry, e.g., Octet assay) assay, with the latter finding particular use in many embodiments. In particular embodiments, the TL1a ABD is capable of binding human TL1A antigen (see SEQ ID NO: 4). In particular embodiments, the antibody specifically binds human TL1A with a K_{D} of less than about 6.5E-11 M, less than about 6.4 E-11 M, or less than about 6.3E-11 as measured by surface plasmon resonance at 25° C., optionally wherein the antibody specifically binds human TL1A with a K_{D} of less than about 3E-11 M, less than about 2.9E-11 M, less than about 2.8E-11 M, or less than about 2.7E-11 M. In some embodiments, an antibody disclosed herein specifically binds human TL1A with a K_{D} of between about 2E-11 M and about 7E-11M, between about 2.5E-11 M and about 7E-11 M, or between about 2.5E-11 M and about 6.5E-11 M as measured by surface plasmon resonance or Biacore at 25° C. In some embodiments, an antibody disclosed herein specifically binds human TL1A with a K_{D} of between about 2.5E-11 M and about 3.5E-11 M, between about 2.5E-11 M and about 3E-11 M, or between about 2.5E-11 M and about 2.7E-11 M as measured by surface plasmon resonance or Biacore at 25° C. In particular embodiments, the antibody the antibody inhibits TL1A activity in a TL1A luciferase reporter assay with an IC₅₀ of less than about 4.5 nM. In some embodiments, an antibody disclosed herein inhibits TL1A activity in a TL1A luciferase reporter assay with an IC₅₀ of between about 2.5 nM and about 4.5 nM, between about 3.5 nM and about 5.5 nM, or between about 4 nM and about 5 nM.

[0294] In some embodiments, a TL1A binding domain comprises a variable heavy domain comprising a vhCDR1, a vhCDR2, and a vhCDR3 contained within a variable heavy domain comprising the amino acid sequence of SEQ ID NO: 2241, and a variable light domain comprising a vlCDR1, a vlCDR2, and a vlCDR3 contained within a variable light domain comprising the amino acid sequence of SEQ ID NO: 2243. In some embodiments, the CDRs are as defined by Kabat. In other embodiments, the CDRs are as defined by Chothia, Kabat+Chothia, AbM, contact, or IMGT. In some embodiments, the variable heavy domain comprises a vhCDR1 comprising the amino acid sequence of SEQ ID NO: 102, a vhCDR2 comprising the amino acid sequence of SEQ ID NO: 1924, and a vhCDR3 comprising the amino acid sequence of SEQ ID NO: 1203, and (ii) the variable light domain comprises a vlCDR1 comprising the amino acid sequence of SEQ ID NO: 106, a vlCDR2 comprising the amino acid sequence of SEQ ID NO: 107, and a vlCDR3 comprising the amino acid sequence of SEQ ID NO: 108. In some embodiments, a TL1A binding domain comprises a set of 6 CDRs with 1, 2, 3, 4, 5, 6, 7, 8, 9, 10 amino acid modifications as compared to the 6 CDRs of any of the above TL1A binding domains. That is, the CDRs can be modified as long as the total number of changes in the set of 6 CDRs is less than 11 amino acid modifications, with any combination of CDRs being changed (e.g., there may be one change in vlCDR1, two in vhCDR2, none in vhCDR3, etc.). In some embodiments, a TL1A binding domain comprises a set of 6 CDRs that are at least 90, 95, 97, 98 or 99% identical to the 6 CDRs of any of the above TL1A binding domains. In some embodiments, the variable heavy domain comprises the amino acid sequence of SEQ ID NO: 2241, and the variable light domain comprises the amino acid sequence of SEQ ID NO: 2243. In some such antibodies, the variable heavy domain or the variable light domain can comprise variants of any of the above in which an N-terminal glutamine or glutamate is replaced with pyroglutamate. In some embodiments, the TL1A binding domain comprises a variant VH domain and/or variant VL domain having 1, 2, 3, 4, 5, 6, 7, 8, 9 or 10 amino acid changes from any of the above VH and VL domains. In some embodiments, the TL1A binding domain comprises a variant VH domain and/or variant VL domain at least 90%, 95%, 97%, 98%, or 99% identical to any of the above VH and VL domains. In some embodiments, the variant VH domain and/or VL domain has amino acid changes in a framework region (e.g., FR1, FR2, FR3, or FR4) but not in a CDR. In some embodiments, the changes are amino acid substitutions at one, two, three, or more of the following residues: (a) rare framework residues that differ between the murine antibody framework (i.e., donor antibody framework) and the human antibody framework (i.e., acceptor antibody framework); (b) Vernier zone residues when differing between donor antibody framework and acceptor antibody framework; (c) interchain packing residues at the VH/VL interface that differ between the donor antibody framework and the acceptor antibody framework; (d) canonical residues which differ between the donor antibody framework and the acceptor antibody framework sequences, particularly the framework regions crucial for the definition of the canonical class of the murine antibody CDR loops; (e) residues that are adjacent to a CDR; (g) residues capable of interacting with the antigen; (h) residues capable of interacting with the CDR; and (i) contact residues between the VH domain and the VL domain. In some embodiments, the substitutions are residues that are adjacent to a CDR, residues capable of interacting with the antigen, or residues capable of interacting with the CDR. In some embodiments, the VH sequence includes 53Y (i.e., a Y at position 53) and/or 100V (i.e., a V at position 100) as numbered by Kabat. In some embodiments, the VH sequence includes 53Y and 100V. In some embodiments, the VL sequence includes 120Q (i.e., a Q at position 120) as numbered by Kabat. In certain embodiments, the TL1A binding domain is capable of binding to TL1A, as measured at least one of a Biacore, surface plasmon resonance (SPR) and/or BLI (biolayer interferometry, e.g., Octet assay) assay, with the latter finding particular use in many embodiments. In particular embodiments, the TL1a ABD is capable of binding human TL1A antigen (see SEQ ID NO: 4).

[0295] In some embodiments, a TL1A binding domain comprises a variable heavy domain comprising a vhCDR1, a vhCDR2, and a vhCDR3 contained within a variable heavy domain comprising the amino acid sequence of SEQ ID NO: 2253, and a variable light domain comprising a vlCDR1, a vlCDR2, and a vlCDR3 contained within a variable light domain comprising the amino acid sequence of SEQ ID NO: 2243. In some embodiments, the CDRs are as defined by Kabat. In other embodiments, the CDRs are as defined by Chothia, Kabat+Chothia, AbM, contact, or IMGT. In some embodiments, the variable heavy domain comprises a vhCDR1 comprising the amino acid sequence of SEQ ID NO: 1201, a vhCDR2 comprising the amino acid sequence of SEQ ID NO: 1202, and a vhCDR3 comprising the amino acid sequence of SEQ ID NO: 1203, and (ii) the variable light domain comprises a vlCDR1 comprising the amino acid sequence of SEQ ID NO: 106, a vlCDR2 comprising the amino acid sequence of SEQ ID NO: 107, and a vlCDR3 comprising the amino acid sequence of SEQ ID NO: 108. In some embodiments, a TL1A binding domain comprises a set of 6 CDRs with 1, 2, 3, 4, 5, 6, 7, 8, 9, 10 amino acid modifications as compared to the 6 CDRs of any of the above TL1A binding domains. That is, the CDRs can be modified as long as the total number of changes in the set of 6 CDRs is less than 11 amino acid modifications, with any combination of CDRs being changed (e.g., there may be one change in vlCDR1, two in vhCDR2, none in vhCDR3, etc.). In some embodiments, a TL1A binding domain comprises a set of 6 CDRs that are at least 90, 95, 97, 98 or 99% identical to the 6 CDRs of any of the above TL1A binding domains. In some embodiments, the variable heavy domain comprises the amino acid sequence of SEQ ID NO: 2253, and the variable light domain comprises the amino acid sequence of SEQ ID NO: 2243. In some such antibodies, the variable heavy domain or the variable light domain can comprise variants of any of the above in which an N-terminal glutamine or glutamate is replaced with pyroglutamate. In some embodiments, the TL1A binding domain comprises a variant VH domain and/or variant VL domain having 1, 2, 3, 4, 5, 6, 7, 8, 9 or 10 amino acid changes from any of the above VH and VL domains. In some embodiments, the TL1A binding domain comprises a variant VH domain and/or variant VL domain at least 90%, 95%, 97%, 98%, or 99% identical to any of the above VH and VL domains. In some embodiments, the variant VH domain and/or VL domain has amino acid changes in a framework region (e.g., FR1, FR2, FR3, or FR4) but not in a CDR. In some embodiments, the changes are amino acid substitutions at one, two, three, or more of the following residues: (a) rare framework residues that differ between the murine antibody framework (i.e., donor antibody framework) and the human antibody framework (i.e., acceptor antibody framework); (b) Vernier zone residues when differing between donor antibody framework and acceptor antibody framework; (c) interchain packing residues at the VH/VL interface that differ between the donor antibody framework and the acceptor antibody framework; (d) canonical residues which differ between the donor antibody framework and the acceptor antibody framework sequences, particularly the framework regions crucial for the definition of the canonical class of the murine antibody CDR loops; (e) residues that are adjacent to a CDR; (g) residues capable of interacting with the antigen; (h) residues capable of interacting with the CDR; and (i) contact residues between the VH domain and the VL domain. In some embodiments, the substitutions are residues that are adjacent to a CDR, residues capable of interacting with the antigen, or residues capable of interacting with the CDR. In some embodiments, the VH sequence includes 53Y (i.e., a Y at position 53) and/or 100V (i.e., a V at position 100) as numbered by Kabat. In some embodiments, the VH sequence includes 53Y and 100V. In some embodiments, the VL sequence includes 120Q (i.e., a Q at position 120) as numbered by Kabat. In certain embodiments, the TL1A binding domain is capable of binding to TL1A, as measured at least one of a Biacore, surface plasmon resonance (SPR) and/or BLI (biolayer interferometry, e.g., Octet assay) assay, with the latter finding particular use in many embodiments. In particular embodiments, the TL1a ABD is capable of binding human TL1A antigen (see SEQ ID NO: 4).

[0296] In some embodiments, a TL1A binding domain comprises a variable heavy domain comprising a vhCDR1, a vhCDR2, and a vhCDR3 contained within a variable heavy domain comprising the amino acid sequence of SEQ ID NO: 2259, and a variable light domain comprising a vlCDR1, a vlCDR2, and a vlCDR3 contained within a variable light domain comprising the amino acid sequence of SEQ ID NO: 2243. In some embodiments, the CDRs are as defined by Kabat. In other embodiments, the CDRs are as defined by Chothia, Kabat+Chothia, AbM, contact, or IMGT. In some embodiments, the variable heavy domain comprises a vhCDR1 comprising the amino acid sequence of SEQ ID NO: 102, a vhCDR2 comprising the amino acid sequence of SEQ ID NO: 1924, and a vhCDR3 comprising the amino acid sequence of SEQ ID NO: 104, and (ii) the variable light domain comprises a vlCDR1 comprising the amino acid sequence of SEQ ID NO: 106, a vlCDR2 comprising the amino acid sequence of SEQ ID NO: 107, and a vlCDR3 comprising the amino acid sequence of SEQ ID NO: 108. In some embodiments, a TL1A binding domain comprises a set of 6 CDRs with 1, 2, 3, 4, 5, 6, 7, 8, 9, 10 amino acid modifications as compared to the 6 CDRs of any of the above TL1A binding domains. That is, the CDRs can be modified as long as the total number of changes in the set of 6 CDRs is less than 11 amino acid modifications, with any combination of CDRs being changed (e.g., there may be one change in vlCDR1, two in vhCDR2, none in vhCDR3, etc.). In some embodiments, a TL1A binding domain comprises a set of 6 CDRs that are at least 90, 95, 97, 98 or 99% identical to the 6 CDRs of any of the above TL1A binding domains. In some embodiments, the variable heavy domain comprises the amino acid sequence of SEQ ID NO: 2259, and the variable light domain comprises the amino acid sequence of SEQ ID NO: 2243. In some such antibodies, the variable heavy domain or the variable light domain can comprise variants of any of the above in which an N-terminal glutamine or glutamate is replaced with pyroglutamate. In some embodiments, the TL1A binding domain comprises a variant VH domain and/or variant VL domain having 1, 2, 3, 4, 5, 6, 7, 8, 9 or 10 amino acid changes from any of the above VH and VL domains. In some embodiments, the TL1A binding domain comprises a variant VH domain and/or variant VL domain at least 90%, 95%, 97%, 98%, or 99% identical to any of the above VH and VL domains. In some embodiments, the variant VH domain and/or VL domain has amino acid changes in a framework region (e.g., FR1, FR2, FR3, or FR4) but not in a CDR. In some embodiments, the changes are amino acid substitutions at one, two, three, or more of the following residues: (a) rare framework residues that differ between the murine antibody framework (i.e., donor antibody framework) and the human antibody framework (i.e., acceptor antibody framework); (b) Vernier zone residues when differing between donor antibody framework and acceptor antibody framework; (c) interchain packing residues at the VH/VL interface that differ between the donor antibody framework and the acceptor antibody framework; (d) canonical residues which differ between the donor antibody framework and the acceptor antibody framework sequences, particularly the framework regions crucial for the definition of the canonical class of the murine antibody CDR loops; (e) residues that are adjacent to a CDR; (g) residues capable of interacting with the antigen; (h) residues capable of interacting with the CDR; and (i) contact residues between the VH domain and the VL domain. In some embodiments, the substitutions are residues that are adjacent to a CDR, residues capable of interacting with the antigen, or residues capable of interacting with the CDR. In some embodiments, the VH sequence includes 53Y (i.e., a Y at position 53) and/or 100V (i.e., a V at position 100) as numbered by Kabat. In some embodiments, the VH sequence includes 53Y and 100V. In some embodiments, the VL sequence includes 120Q (i.e., a Q at position 120) as numbered by Kabat. In certain embodiments, the TL1A binding domain is capable of binding to TL1A, as measured at least one of a Biacore, surface plasmon resonance (SPR) and/or BLI (biolayer interferometry, e.g., Octet assay) assay, with the latter finding particular use in many embodiments. In particular embodiments, the TL1a ABD is capable of binding human TL1A antigen (see SEQ ID NO: 4).

[0297] In some embodiments, a TL1A binding domain comprises a variable heavy domain comprising a vhCDR1, a vhCDR2, and a vhCDR3 contained within a variable heavy domain comprising the amino acid sequence of SEQ ID NO: 1674, and a variable light domain comprising a vlCDR1, a vlCDR2, and a vlCDR3 contained within a variable light domain comprising the amino acid sequence of SEQ ID NO: 1204. In some embodiments, the CDRs are as defined by Kabat. In other embodiments, the CDRs are as defined by Chothia, Kabat+Chothia, AbM, contact, or IMGT. In some embodiments, the variable heavy domain comprises a vhCDR1 comprising the amino acid sequence of SEQ ID NO: 102, a vhCDR2 comprising the amino acid sequence of SEQ ID NO: 1924, and a vhCDR3 comprising the amino acid sequence of SEQ ID NO: 1203, and (ii) the variable light domain comprises a vlCDR1 comprising the amino acid sequence of SEQ ID NO: 106, a vlCDR2 comprising the amino acid sequence of SEQ ID NO: 107, and a vlCDR3 comprising the amino acid sequence of SEQ ID NO: 108. In some embodiments, a TL1A binding domain comprises a set of 6 CDRs with 1, 2, 3, 4, 5, 6, 7, 8, 9, 10 amino acid modifications as compared to the 6 CDRs of any of the above TL1A binding domains. That is, the CDRs can be modified as long as the total number of changes in the set of 6 CDRs is less than 11 amino acid modifications, with any combination of CDRs being changed (e.g., there may be one change in vlCDR1, two in vhCDR2, none in vhCDR3, etc.). In some embodiments, a TL1A binding domain comprises a set of 6 CDRs that are at least 90, 95, 97, 98 or 99% identical to the 6 CDRs of any of the above TL1A binding domains. In some embodiments, the variable heavy domain comprises the amino acid sequence of SEQ ID NO: 1674, and the variable light domain comprises the amino acid sequence of SEQ ID NO: 1204. In some such antibodies, the variable heavy domain or the variable light domain can comprise variants of any of the above in which an N-terminal glutamine or glutamate is replaced with pyroglutamate. In some embodiments, the TL1A binding domain comprises a variant VH domain and/or variant VL domain having 1, 2, 3, 4, 5, 6, 7, 8, 9 or 10 amino acid changes from any of the above VH and VL domains. In some embodiments, the TL1A binding domain comprises a variant VH domain and/or variant VL domain at least 90%, 95%, 97%, 98%, or 99% identical to any of the above VH and VL domains. In some embodiments, the variant VH domain and/or VL domain has amino acid changes in a framework region (e.g., FR1, FR2, FR3, or FR4) but not in a CDR. In some embodiments, the changes are amino acid substitutions at one, two, three, or more of the following residues: (a) rare framework residues that differ between the murine antibody framework (i.e., donor antibody framework) and the human antibody framework (i.e., acceptor antibody framework); (b) Vernier zone residues when differing between donor antibody framework and acceptor antibody framework; (c) interchain packing residues at the VH/VL interface that differ between the donor antibody framework and the acceptor antibody framework; (d) canonical residues which differ between the donor antibody framework and the acceptor antibody framework sequences, particularly the framework regions crucial for the definition of the canonical class of the murine antibody CDR loops; (e) residues that are adjacent to a CDR; (g) residues capable of interacting with the antigen; (h) residues capable of interacting with the CDR; and (i) contact residues between the VH domain and the VL domain. In some embodiments, the substitutions are residues that are adjacent to a CDR, residues capable of interacting with the antigen, or residues capable of interacting with the CDR. In some embodiments, the VH sequence includes 53Y (i.e., a Y at position 53) and/or 100V (i.e., a V at position 100) as numbered by Kabat. In some embodiments, the VH sequence includes 53Y and 100V. In some embodiments, the VL sequence includes 120Q (i.e., a Q at position 120) as numbered by Kabat. In certain embodiments, the TL1A binding domain is capable of binding to TL1A, as measured at least one of a Biacore, surface plasmon resonance (SPR) and/or BLI (biolayer interferometry, e.g., Octet assay) assay, with the latter finding particular use in many embodiments. In particular embodiments, the TL1a ABD is capable of binding human TL1A antigen (see SEQ ID NO: 4).

[0298] In some embodiments, a TL1A binding domain comprises a variable heavy domain comprising a vhCDR1, a vhCDR2, and a vhCDR3 contained within a variable heavy domain comprising the amino acid sequence of SEQ ID NO: 1200, and a variable light domain comprising a vlCDR1, a vlCDR2, and a vlCDR3 contained within a variable light domain comprising the amino acid sequence of SEQ ID NO: 1204. In some embodiments, the CDRs are as defined by Kabat. In other embodiments, the CDRs are as defined by Chothia, Kabat+Chothia, AbM, contact, or IMGT. In some embodiments, the variable heavy domain comprises a vhCDR1 comprising the amino acid sequence of SEQ ID NO: 1201, a vhCDR2 comprising the amino acid sequence of SEQ ID NO: 1202, and a vhCDR3 comprising the amino acid sequence of SEQ ID NO: 1203, and (ii) the variable light domain comprises a vlCDR1 comprising the amino acid sequence of SEQ ID NO: 106, a vlCDR2 comprising the amino acid sequence of SEQ ID NO: 107, and a vlCDR3 comprising the amino acid sequence of SEQ ID NO: 108. In some embodiments, a TL1A binding domain comprises a set of 6 CDRs with 1, 2, 3, 4, 5, 6, 7, 8, 9, 10 amino acid modifications as compared to the 6 CDRs of any of the above TL1A binding domains. That is, the CDRs can be modified as long as the total number of changes in the set of 6 CDRs is less than 11 amino acid modifications, with any combination of CDRs being changed (e.g., there may be one change in vlCDR1, two in vhCDR2, none in vhCDR3, etc.). In some embodiments, a TL1A binding domain comprises a set of 6 CDRs that are at least 90, 95, 97, 98 or 99% identical to the 6 CDRs of any of the above TL1A binding domains. In some embodiments, the variable heavy domain comprises the amino acid sequence of SEQ ID NO: 1200, and the variable light domain comprises the amino acid sequence of SEQ ID NO: 1204. In some such antibodies, the variable heavy domain or the variable light domain can comprise variants of any of the above in which an N-terminal glutamine or glutamate is replaced with pyroglutamate. In some embodiments, the TL1A binding domain comprises a variant VH domain and/or variant VL domain having 1, 2, 3, 4, 5, 6, 7, 8, 9 or 10 amino acid changes from any of the above VH and VL domains. In some embodiments, the TL1A binding domain comprises a variant VH domain and/or variant VL domain at least 90%, 95%, 97%, 98%, or 99% identical to any of the above VH and VL domains. In some embodiments, the variant VH domain and/or VL domain has amino acid changes in a framework region (e.g., FR1, FR2, FR3, or FR4) but not in a CDR. In some embodiments, the changes are amino acid substitutions at one, two, three, or more of the following residues: (a) rare framework residues that differ between the murine antibody framework (i.e., donor antibody framework) and the human antibody framework (i.e., acceptor antibody framework); (b) Vernier zone residues when differing between donor antibody framework and acceptor antibody framework; (c) interchain packing residues at the VH/VL interface that differ between the donor antibody framework and the acceptor antibody framework; (d) canonical residues which differ between the donor antibody framework and the acceptor antibody framework sequences, particularly the framework regions crucial for the definition of the canonical class of the murine antibody CDR loops; (e) residues that are adjacent to a CDR; (g) residues capable of interacting with the antigen; (h) residues capable of interacting with the CDR; and (i) contact residues between the VH domain and the VL domain. In some embodiments, the substitutions are residues that are adjacent to a CDR, residues capable of interacting with the antigen, or residues capable of interacting with the CDR. In some embodiments, the VH sequence includes 53Y (i.e., a Y at position 53) and/or 100V (i.e., a V at position 100) as numbered by Kabat. In some embodiments, the VH sequence includes 53Y and 100V. In some embodiments, the VL sequence includes 120Q (i.e., a Q at position 120) as numbered by Kabat. In certain embodiments, the TL1A binding domain is capable of binding to TL1A, as measured at least one of a Biacore, surface plasmon resonance (SPR) and/or BLI (biolayer interferometry, e.g., Octet assay) assay, with the latter finding particular use in many embodiments. In particular embodiments, the TL1a ABD is capable of binding human TL1A antigen (see SEQ ID NO: 4).

[0299] In some embodiments, an anti-TL1A antibody or an anti-TL1A×anti-IL23 antibody comprises a heavy chain comprising the amino acid sequence of SEQ ID NO: 2240 or a variant thereof in which the N-terminal glutamine is replaced with pyroglutamate and/or the C-terminal lysine or the C-terminal lysine and glycine are removed, and a light chain comprising the amino acid sequence of SEQ ID NO: 2242. In some embodiments, an anti-TL1A antibody or an anti-TL1A×anti-IL23 antibody comprises a heavy chain comprising the amino acid sequence of SEQ ID NO: 2252 or a variant thereof in which the N-terminal glutamine is replaced with pyroglutamate and/or the C-terminal lysine or the C-terminal lysine and glycine are removed, and a light chain comprising the amino acid sequence of SEQ ID NO: 2242. In some embodiments, an anti-TL1A antibody or an anti-TL1A×anti-IL23 antibody comprises a heavy chain comprising the amino acid sequence of SEQ ID NO: 2258 or a variant thereof in which the N-terminal glutamine is replaced with pyroglutamate and/or the C-terminal lysine or the C-terminal lysine and glycine are removed, and a light chain comprising the amino acid sequence of SEQ ID NO: 2242. In some embodiments, an anti-TL1A antibody or an anti-TL1A×anti-IL23 antibody comprises a heavy chain comprising the amino acid sequence of SEQ ID NO: 2264 or a variant thereof in which the C-terminal lysine or the C-terminal lysine and glycine are removed, and a light chain comprising the amino acid sequence of SEQ ID NO: 2265 or a variant thereof in which the N-terminal glutamine is replaced with pyroglutamate. In some embodiments, an anti-TL1A antibody or an anti-TL1A×anti-IL23 antibody comprises a heavy chain comprising the amino acid sequence of SEQ ID NO: 2264 or a variant thereof in which the C-terminal lysine or the C-terminal lysine and glycine are removed, and a light chain comprising the amino acid sequence of SEQ ID NO: 2269 or a variant thereof in which the N-terminal glutamine is replaced with pyroglutamate. In some embodiments, an anti-TL1A antibody or an anti-TL1A×anti-IL23 antibody comprises an anti-TL1A heavy chain and light chain pair from XENP53412, XENP53413, XENP53369, XENP53375, XENP53370, XENP53371, XENP53376, XENP53377, XENP53378, XENP53379, XENP53380, or XENP53414, or heavy chain variants thereof in which the N-terminal glutamine is replaced with pyroglutamate and/or the C-terminal lysine or the C-terminal lysine and glycine are removed, or comprises an anti-TL1A heavy chain and light chain pair from XENP53415 or XENP53387 or heavy chain variants thereof in which the C-terminal lysine or the C-terminal lysine and glycine are removed and/or light chain variants thereof in which the N-terminal glutamine is replaced with pyroglutamate. In some embodiments, an anti-TL1A antibody or an anti-TL1A×anti-IL23 antibody comprises a heavy chain and/or a light chain having 1, 2, 3, 4, 5, 6, 7, 8, 9 or 10 amino acid changes from any of the above heavy chains and light chains. In some embodiments, an anti-TL1A antibody or an anti-TL1A×anti-IL23 antibody comprises a heavy chain and/or a light chain at least 90%, 95%, 97%, 98%, or 99% identical to any of the above heavy chains and light chains. In some embodiments, the VH sequence includes 53Y (i.e., a Y at position 53) and/or 100V (i.e., a V at position 100) as numbered by Kabat. In some embodiments, the VH sequence includes 53Y and 100V In some embodiments, the VL sequence includes 120Q (i.e., a Q at position 120) as numbered by Kabat. In some embodiments, the amino acid changes are in a constant region but not in a variable region. In some embodiments, the amino acid changes are in a constant region or in a framework region (e.g., FR1, FR2, FR3, or FR4) but not in a CDR. In some embodiments, the changes are amino acid substitutions at one, two, three, or more of the following residues: (a) rare framework residues that differ between the murine antibody framework (i.e., donor antibody framework) and the human antibody framework (i.e., acceptor antibody framework); (b) Vernier zone residues when differing between donor antibody framework and acceptor antibody framework; (c) interchain packing residues at the VH/VL interface that differ between the donor antibody framework and the acceptor antibody framework; (d) canonical residues which differ between the donor antibody framework and the acceptor antibody framework sequences, particularly the framework regions crucial for the definition of the canonical class of the murine antibody CDR loops; (e) residues that are adjacent to a CDR; (g) residues capable of interacting with the antigen; (h) residues capable of interacting with the CDR; and (i) contact residues between the VH domain and the VL domain. In some embodiments, the substitutions are residues that are adjacent to a CDR, residues capable of interacting with the antigen, or residues capable of interacting with the CDR. In some embodiments, the VH sequence includes 53Y (i.e., a Y at position 53) and/or 100V (i.e., a V at position 100) as numbered by Kabat. In some embodiments, the VH sequence includes 53Y and 100V. In some embodiments, the VL sequence includes 120Q (i.e., a Q at position 120) as numbered by Kabat. In certain embodiments, the TL1A binding domain is capable of binding to TL1A, as measured at least one of a Biacore, surface plasmon resonance (SPR) and/or BLI (biolayer interferometry, e.g., Octet assay) assay, with the latter finding particular use in many embodiments. In particular embodiments, the TL1a ABD is capable of binding human TL1A antigen (see SEQ ID NO: 4).

### B. IL23 Binding Domains

[0300] The anti-TL1A×anti-IL23 antibodies provided herein include at least one IL23 binding domain (e.g., an IL23p19 binding domain). Likewise, the anti-IL23 antibodies provided herein include at least one IL23 binding domain (e.g., an IL23p19 binding domain). Any suitable IL23 binding domain can be included in the anti-TL1A×anti-IL23 antibodies or anti-IL23 antibodies provided herein. For example, the IL23 binding domain can be a human IL23 binding domain (e.g., a human IL23p19 binding domain).

[0301] Suitable IL23 binding domains can Tables a set of 6 CDRs as depicted in the tables and sequences (see, e.g., Tables 44, 11, 24-26, 29-34, and 49 and the VH sequences in SEQ ID NOS: 1927-2132 and VL sequences in SEQ ID NOS: 2133-2232, and VH/VL pairs set forth in SEQ ID NOS: 2364-2379, or see, e.g., Tables 11 and 25), either as they are underlined or, in the case where a different numbering scheme is used as described herein and as shown in Table 3, as the CDRs that are identified using other alignments within the variable heavy (VH) domain and variable light domain (VL) sequences of those depicted in Tables 44, 11, 24-26, 29-34, and 49 and the VH sequences in SEQ ID NOS: 1927-2132 and VL sequences in SEQ ID NOS: 2133-2232, and VH/VL pairs set forth in SEQ ID NOS: 2364-2379, or see, e.g., Tables 11 and 25. Suitable TL23 ABDs can also include the entire VH and VL sequences as depicted in these sequences and tables, used as scFvs or as Fabs.

[0302] In one embodiment, the TL23 antigen-binding domain includes the 6 CDRs (i.e., vhCDR1-3 and vlCDR1-3) of any of the TL23 binding domains described herein, including the tables and sequences (see, e.g., Tables 44, 11, 24-26, 29-34, and 49 and the VH sequences in SEQ ID NOS: 1927-2132 and VL sequences in SEQ ID NOS: 2133-2232, and VH/VL pairs set forth in SEQ ID NOS: 2364-2379, or see, e.g., Tables 11 and 25). In some embodiments, the IL23 ABD is IL23-A[IL23]_H1L1 (SEQ ID NOS: 177 and 178 and Table 11). In some embodiments, the IL23 ABD is an IL23 ABD as disclosed in Table 44 or Table 24. Table 11 depicts the variable heavy and variable light domains of an illustrative IL23 antibody. IL23-A[IL23] binding domain specifically binds to the p19 subunit of IL-23.

TABLE 11
IL23-A[IL23]_H1L1

| | Sequence | SEQ ID NO: |
|---|---|---|
| Variable | QVQLVQSGAEVKKPGSSVKVSCKASGYTFTDQTIHWMRQAPGQGLEWIG | 179 |
| Heavy (vh) | YIYPRDDSPKYNENFKGKVTITADKSTSTAYMELSSLRSEDTAVYYCAIPD | |
| Domain | RSGYAWFIYWGQGTLVTVSS | |
| vhCDR1 | DQTIH | 180 |
| vhCDR2 | YIYPRDDSPKYNENFKG | 181 |
| vhCDR3 | PDRSGYAWFIY | 182 |
| Variable Light | DIQMTQSPSSLSASVGDRVTITCKASRDVAIAVAWYQQKPGKVPKLLIYW | 183 |
| (vl) Domain | ASTRHTGVPSRFSGSGSRTDFTLTISSLQPEDVADYFCHQYSSYPFTFGSGT | |
| | KLEIK | |
| VlCDR1 | KASRDVAIAVA | 184 |
| VlCDR2 | WASTRHT | 115 |
| VlCDR3 | HQYSSYPFT | 185 |

[0303] In addition to the parental CDR sets disclosed in the tables that form the IL23 ABDs (see, e.g., Tables 44, 11, 24-26, 29-34, and 49 and the VH sequences in SEQ ID NOS: 1927-2132 and VL sequences in SEQ ID NOS: 2133-2232, and VH/VL pairs set forth in SEQ ID NOS: 2364-2379, or see, e.g., Tables 11 and 25), provided herein are variant IL23 ABDs having CDRs that include at least one modification of the IL23 ABD CDRs disclosed herein (see, e.g., Tables 44, 11, 24-26, 29-34, and 49 and the VH sequences in SEQ ID NOS: 1927-2132 and VL sequences in SEQ ID NOS: 2133-2232, and VH/VL pairs set forth in SEQ ID NOS: 2364-2379, or see, e.g., Tables 11 and 25). In one embodiment, the TL23 ABD includes a set of 6 CDRs with 1, 2, 3, 4, 5, 6, 7, 8, 9, 10 amino acid modifications as compared to the 6 CDRs of a IL23 ABD as described herein, including the tables or sequences (see, e.g., Tables 44, 11, 24-26, 29-34, and 49 and the VH sequences in SEQ ID NOS: 1927-2132 and VL sequences in SEQ ID NOS: 2133-2232, and VH/VL pairs set forth in SEQ ID NOS: 2364-2379, or see, e.g., Tables 11 and 25). That is, the CDRs can be modified as long as the total number of changes in the set of 6 CDRs is less than 11 amino acid modifications, with any combination of CDRs being changed (e.g., there may be one change in vlCDR1, two in vhCDR2, none in vhCDR3, etc.). In exemplary embodiments, the IL23 ABD includes a set of 6 CDRs with 1, 2, 3, 4, 5, 6, 7, 8, 9, 10 amino acid modifications as compared to the 6 CDRs of IL23-A[IL23]_H1L1 (Table 11). In exemplary embodiments, the IL23 ABD includes a set of 6 CDRs with 1, 2, 3, 4, 5, 6, 7, 8, 9, 10 amino acid modifications as compared to the 6 CDRs of an IL23 ABD in Table 44 or 24. In certain embodiments, the IL23 ABD is capable of binding IL23 antigen, as measured by at least one of a Biacore, surface plasmon resonance (SPR) and/or BLI (biolayer interferometry, e.g., Octet assay) assay, with the latter finding particular use in many embodiments. In particular embodiments, the IL23 ABD is capable of binding human IL23p19 antigen (see SEQ ID NO: 1). In some embodiments, the VL sequence includes 66V (i.e., a V at position 66) and/or 105Y (i.e., a Y at position 105) as numbered by Kabat. In some embodiments, the VL sequence includes 66V and 105Y.

[0304] In some embodiments, the IL23 ABD of the subject anti-TL1A×anti-IL23 antibody includes 6 CDRs that are at least 90, 95, 97, 98 or 99% identical to the 6 CDRs of a IL23 ABD as described herein, including the tables and sequences (see, e.g., Tables 44, 11, 24-26, 29-34, and 49 and the VH sequences in SEQ ID NOS: 1927-2132 and VL sequences in SEQ ID NOS: 2133-2232, and VH/VL pairs set forth in SEQ ID NOS: 2364-2379, or see, e.g., Tables 11 and 25). In exemplary embodiments, the IL23 ABD includes 6 CDRs that are at least 90, 95, 97, 98 or 99% identical to the 6 CDRs of IL23-A[IL23]_H1L1 (Table 11). In exemplary embodiments, the IL23 ABD includes 6 CDRs that are at least 90, 95, 97, 98 or 99% identical to the 6 CDRs of an IL23 ABD in Table 44 or 24. In certain embodiments, the IL23 ABD is capable of binding IL23 antigen, as measured by at least one of a Biacore, surface plasmon resonance (SPR) and/or BLI (biolayer interferometry, e.g., Octet assay) assay, with the latter finding particular use in many embodiments. In particular embodiments, the IL23 ABD is capable of binding human IL23p19 antigen (see SEQ ID NO: 1). In some embodiments, the VL sequence includes 66V (i.e., a V at position 66) and/or 105Y (i.e., a Y at position 105) as numbered by Kabat. In some embodiments, the VL sequence includes 66V and 105Y.

[0305] In another exemplary embodiment, the IL23 ABD of the subject anti-TL1a×anti-IL23 antibody includes the variable heavy (VH) domain and variable light (VL) domain of any one of the IL23 ABDs described herein, including the tables and sequences (see, e.g., Tables 44, 11, 24-26, 29-34, and 49 and the VH sequences in SEQ ID NOS: 1927-2132 and VL sequences in SEQ ID NOS: 2133-2232, and VH/VL pairs set forth in SEQ ID NOS: 2364-2379, or see, e.g., Tables 11 and 25). In exemplary embodiments, the IL23 ABD is IL23-A[IL23]_H1L1 (Table 11). In exemplary embodiments, the IL23 ABD is an IL23 ABD in Table 44 or 24.

[0306] In some embodiments, the anti-TL1A×anti-IL23 antibody includes a IL23 ABD that includes a variable heavy domain and/or a variable light domain that are variants of a TL1AABD VH and VL domain disclosed herein (see, e.g., Tables 44, 11, 24-26, 29-34, and 49 and the VH sequences in SEQ ID NOS: 1927-2132 and VL sequences in SEQ ID NOS: 2133-2232, and VH/VL pairs set forth in SEQ ID NOS: 2364-2379, or see, e.g., Tables 11 and 25). In one embodiment, the variant VH domain and/or VL domain has from 1, 2, 3, 4, 5, 6, 7, 8, 9 or 10 amino acid changes from a VH and/or VL domain of a IL23 ABD described herein, including the tables and sequences (see, e.g., Tables 44, 11, 24-26, 29-34, and 49 and the VH sequences in SEQ ID NOS: 1927-2132 and VL sequences in SEQ ID NOS: 2133-2232, and VH/VL pairs set forth in SEQ ID NOS: 2364-2379, or see, e.g., Tables 11 and 25). In some embodiments, the variant VH domain and/or VL domain has includes 1, 2, 3, 4, 5, 6, 7, 8, 9 or 10 amino acid changes in a framework region (e.g., FR1, FR2, FR3, or FR4) from a VH and/or VL domain of a IL23 ABD described herein, including the tables and sequences (see, e.g., Tables 44, 11, 24-26, 29-34, and 49 and the VH sequences in SEQ ID NOS: 1927-2132 and VL sequences in SEQ ID NOS: 2133-2232, and VH/VL pairs set forth in SEQ ID NOS: 2364-2379, or see, e.g., Tables 11 and 25). In some embodiments, the variant VH and/or VL domain does not have any changes in the CDRs from a VH and/or VL domain of an IL23 ABD described herein but has changes in a framework region. In some embodiments, the variant VH and/or VL domain includes 1, 2, 3, 4, 5, 6, 7, 8, 9 or 10 amino acid changes in a framework region (e.g., FR1, FR2, FR3, or FR4) from a VH and/or VL domain of an IL23 ABD described herein, wherein the changes are amino acid substitutions at one, two, three, or more of the following residues: (a) rare framework residues that differ between the murine antibody framework (i.e., donor antibody framework) and the human antibody framework (i.e., acceptor antibody framework); (b) Vernier zone residues when differing between donor antibody framework and acceptor antibody framework; (c) interchain packing residues at the VH/VL interface that differ between the donor antibody framework and the acceptor antibody framework; (d) canonical residues which differ between the donor antibody framework and the acceptor antibody framework sequences, particularly the framework regions crucial for the definition of the canonical class of the murine antibody CDR loops; (e) residues that are adjacent to a CDR; (g) residues capable of interacting with the antigen; (h) residues capable of interacting with the CDR; and (i) contact residues between the VH domain and the VL domain. In some embodiments, the substitutions are residues that are adjacent to a CDR, residues capable of interacting with the antigen, or residues capable of interacting with the CDR. In exemplary embodiments, the variant VH domain and/or VL domain has from 1, 2, 3, 4, 5, 6, 7, 8, 9 or 10 amino acid changes from a VH and/or VL domain of IL23-A[IL23]_H1L1 (Table 11). In exemplary embodiments, the variant VH domain and/or VL domain has from 1, 2, 3, 4, 5, 6, 7, 8, 9 or 10 amino acid changes from a VH and/or VL domain of an IL23 ABD in Table 44 or 24. In exemplary embodiments, the variant VH domain and/or VL domain has from 1, 2, 3, 4, 5, 6, 7, 8, 9 or 10 amino acid changes in a framework region (e.g., FR1, FR2, FR3, or FR4) of the VH and/or VL domain of IL23-A[IL23]_H1L1 (Table 11). In certain embodiments, the IL23 ABD is capable of binding to IL23, as measured at least one of a Biacore, surface plasmon resonance (SPR) and/or BLI (biolayer interferometry, e.g., Octet assay) assay, with the latter finding particular use in many embodiments. In particular embodiments, the IL23 ABD is capable of binding human IL23p19 antigen (see SEQ ID NO: 1). In some embodiments, the VL sequence includes 66V (i.e., a V at position 66) and/or 105Y (i.e., a Y at position 105) as numbered by Kabat. In some embodiments, the VL sequence includes 66V and 105Y.

[0307] In one embodiment, the variant VH and/or VL domain is at least 90, 95, 97, 98 or 99% identical to the VH and/or VL of an IL23 ABD as described herein, including the tables and sequences (see, e.g., Tables 44, 11, 24-26, 29-34, and 49 and the VH sequences in SEQ ID NOS: 1927-2132 and VL sequences in SEQ ID NOS: 2133-2232, and VH/VL pairs set forth in SEQ ID NOS: 2364-2379, or see, e.g., Tables 11 and 25). In exemplary embodiments, the variant VH and/or VL domain is at least 90, 95, 97, 98 or 99% identical to the VH and/or VL of one of IL23-A[IL23]_H1L1 (Table 11). In exemplary embodiments, the variant VH and/or VL domain is at least 90, 95, 97, 98 or 99% identical to a VH and/or VL of an IL23 ABD Table 44 or 24. In some embodiments, the variant VH and/or VL domain does not have any changes in the CDRs from a VH and/or VL domain of an IL23 ABD described herein but has changes in a framework region. In some embodiments, the variant VH and/or VL domain includes amino acid changes in a framework region (e.g., FR1, FR2, FR3, or FR4) from a VH and/or VL domain of an IL23 ABD described herein, wherein the changes are amino acid substitutions at one, two, three, or more of the following residues: (a) rare framework residues that differ between the murine antibody framework (i.e., donor antibody framework) and the human antibody framework (i.e., acceptor antibody framework); (b) Vernier zone residues when differing between donor antibody framework and acceptor antibody framework; (c) interchain packing residues at the VH/VL interface that differ between the donor antibody framework and the acceptor antibody framework; (d) canonical residues which differ between the donor antibody framework and the acceptor antibody framework sequences, particularly the framework regions crucial for the definition of the canonical class of the murine antibody CDR loops; (e) residues that are adjacent to a CDR; (g) residues capable of interacting with the antigen; (h) residues capable of interacting with the CDR; and (i) contact residues between the VH domain and the VL domain. In some embodiments, the substitutions are residues that are adjacent to a CDR, residues capable of interacting with the antigen, or residues capable of interacting with the CDR. In certain embodiments, the IL23 ABD is capable of binding to IL23 (e.g., IL23p19), as measured by at least one of a Biacore, surface plasmon resonance (SPR) and/or BLI (biolayer interferometry, e.g., Octet assay) assay, with the latter finding particular use in many embodiments. In particular embodiments, the IL23 ABD is capable of binding human IL23p19 antigen (see SEQ ID NO: 1). In some embodiments, the VL sequence includes 66V (i.e., a V at position 66) and/or 105Y (i.e., a Y at position 105) as numbered by Kabat. In some embodiments, the VL sequence includes 66V and 105Y.

[0308] In some embodiments, an IL23 binding domain comprises a variable heavy domain comprising a vhCDR1, a vhCDR2, and a vhCDR3 contained within a variable heavy domain comprising the amino acid sequence of any one of SEQ ID NOS: 2233, 2235, and 179, and a variable light domain comprising a vlCDR1, a vlCDR2, and a vlCDR3 contained within a variable light domain comprising the amino acid sequence of any one of SEQ ID NOS: 2234, 2237, and 1248. In some embodiments, an IL23 binding domain comprises a variable heavy domain comprising a vhCDR1, a vhCDR2, and a vhCDR3 contained within a variable heavy domain comprising the amino acid sequence of SEQ ID NO: 2233, and a variable light domain comprising a vlCDR1, a vlCDR2, and a vlCDR3 contained within a variable light domain comprising the amino acid sequence of SEQ ID NO: 2234. In some embodiments, an IL23 binding domain comprises a variable heavy domain comprising a vhCDR1, a vhCDR2, and a vhCDR3 contained within a variable heavy domain comprising the amino acid sequence of SEQ ID NO: 2235, and a variable light domain comprising a vlCDR1, a vlCDR2, and a vlCDR3 contained within a variable light domain comprising the amino acid sequence of SEQ ID NO: 2237. In some embodiments, an TL23 binding domain comprises a variable heavy domain comprising a vhCDR1, a vhCDR2, and a vhCDR3 contained within a variable heavy domain comprising the amino acid sequence of SEQ ID NO: 179, and a variable light domain comprising a vlCDR1, a vlCDR2, and a vlCDR3 contained within a variable light domain comprising the amino acid sequence of SEQ ID NO: 1248. In some embodiments, an IL23 binding domain comprises a variable heavy domain comprising a vhCDR1, a vhCDR2, and a vhCDR3 contained within a variable heavy domain comprising the amino acid sequence of SEQ ID NO: 2113, and a variable light domain comprising a vlCDR1, a vlCDR2, and a vlCDR3 contained within a variable light domain comprising the amino acid sequence of SEQ ID NO: 2231. In some embodiments, an IL23 binding domain comprises a variable heavy domain comprising a vhCDR1, a vhCDR2, and a vhCDR3 contained within a variable heavy domain comprising the amino acid sequence of SEQ ID NO: 1967, and a variable light domain comprising a vlCDR1, a vlCDR2, and a vlCDR3 contained within a variable light domain comprising the amino acid sequence of SEQ ID NO: 1248. In some embodiments, an IL23 binding domain comprises a variable heavy domain comprising a vhCDR1, a vhCDR2, and a vhCDR3 contained within any pair of anti-IL23 variable heavy domain and variable light domain in XENP53412, XENP53413, XENP53369, XENP53375, XENP53387, XENP53415, XENP53370, XENP53371, XENP53376, XENP53377, XENP53378, XENP53379, XENP53380, or XENP53414. In some embodiments, the CDRs are as defined by Kabat. In other embodiments, the CDRs are as defined by Chothia, Kabat+Chothia, AbM, contact, or IMGT. In some embodiments, an IL23 binding domain comprises a vhCDR1 comprising the amino acid sequence of SEQ ID NO: 180, a vhCDR2 comprising the amino acid sequence of SEQ ID NO: 181, a vhCDR3 comprising the amino acid sequence of SEQ ID NO: 182 or 2236, a vlCDR1 comprising the amino acid sequence of SEQ ID NO: 184, a vlCDR2 comprising the amino acid sequence of SEQ ID NO: 1249 or 2238, and a vlCDR3 comprising the amino acid sequence of SEQ ID NO: 1250. In some embodiments, an TL23 binding domain comprises a vhCDR1 comprising the amino acid sequence of SEQ ID NO: 180, a vhCDR2 comprising the amino acid sequence of SEQ ID NO: 181, a vhCDR3 comprising the amino acid sequence of SEQ ID NO: 182, a vlCDR1 comprising the amino acid sequence of SEQ ID NO: 184, a vlCDR2 comprising the amino acid sequence of SEQ ID NO: 1249, and a vlCDR3 comprising the amino acid sequence of SEQ ID NO: 1250. In some embodiments, an IL23 binding domain comprises a vhCDR1 comprising the amino acid sequence of SEQ ID NO: 180, a vhCDR2 comprising the amino acid sequence of SEQ ID NO: 181, a vhCDR3 comprising the amino acid sequence of SEQ ID NO: 2236, vlCDR1 comprising the amino acid sequence of SEQ ID NO: 184, a vlCDR2 comprising the amino acid sequence of SEQ ID NO: 2238, and a vlCDR3 comprising the amino acid sequence of SEQ ID NO: 1250. In some embodiments, an IL23 binding domain comprises a vhCDR1 comprising the amino acid sequence of SEQ ID NO: 2239, a vhCDR2 comprising the amino acid sequence of SEQ ID NO: 181, a vhCDR3 comprising the amino acid sequence of SEQ ID NO: 182, a vlCDR1 comprising the amino acid sequence of SEQ ID NO: 184, a vlCDR2 comprising the amino acid sequence of SEQ ID NO: 1249, and a vlCDR3 comprising the amino acid sequence of SEQ ID NO: 1250. In some embodiments, an TL23 binding domain comprises a set of 6 CDRs with 1, 2, 3, 4, 5, 6, 7, 8, 9, 10 amino acid modifications as compared to the 6 CDRs of any of the above IL23 binding domains. That is, the CDRs can be modified as long as the total number of changes in the set of 6 CDRs is less than 11 amino acid modifications, with any combination of CDRs being changed (e.g., there may be one change in vlCDR1, two in vhCDR2, none in vhCDR3, etc.). In some embodiments, an IL23 binding domain comprises a set of 6 CDRs that are at least 90, 95, 97, 98 or 99% identical to the 6 CDRs of any of the above IL23 binding domains. In some embodiments, the VL sequence includes 66V (i.e., a V at position 66) and/or 105Y (i.e., a Y at position 105) as numbered by Kabat. In some embodiments, the VL sequence includes 66V and 105Y In certain embodiments, the IL23 antigen binding domain is capable of binding IL23 antigen, as measured by at least one of a Biacore, surface plasmon resonance (SPR) and/or BLI (biolayer interferometry, e.g., Octet assay) assay, with the latter finding particular use in many embodiments. In particular embodiments, the IL23 binding domain is capable of binding human IL23p19 antigen (see SEQ ID NO: 1). In particular embodiments, the antibody specifically binds human IL23 with a K_{D} of less than about 1.1E-10 M as measured by surface plasmon resonance at 25° C., optionally wherein the antibody specifically binds human IL23 with a K_{D} of less than about 6E-11 M, less than about 5.9E-11 M, less than about 5.8E-11 M, or less than about 5.7E-11 M. In some embodiments, an antibody disclosed herein specifically binds human TL23 with a K_{D} of between about 2.4E-11 and about 1E-10 M or between about 2.4E-11 and about 5.7E-11 M as measured by surface plasmon resonance or Biacore at 25° C. In some embodiments, an antibody disclosed herein specifically binds human IL23 with a K_{D} of between about 5E-11 and about 6E-11 M as measured by surface plasmon resonance or Biacore at 25° C. In particular embodiments, the antibody inhibits TL23 activity in an TL23 luciferase reporter assay with an IC₅₀ of less than about 65 pM, less than about 64 pM, or less than about 63 pM, optionally wherein the antibody inhibits TL23 activity with an IC₅₀ of less than about 60 pM, less than about 59 pM, less than about 58 pM, less than about 57 pM, or less than about 56 pM. In some embodiments, an antibody disclosed herein inhibits IL23 activity in an IL23 luciferase reporter assay with an IC₅₀ of between about 47 pM and about 63 pM or between about 50 pM and about 60 pM.

[0309] In some embodiments, the variable heavy domain comprises the amino acid sequence of any one of SEQ ID NOS: 2233, 2235, and 179, and the variable light domain comprises the amino acid sequence of any one of SEQ ID NOS: 2234, 2237, and 1248. In some embodiments, the variable heavy domain comprises the amino acid sequence of SEQ ID NO: 2233, and the variable light domain comprises the amino acid sequence of SEQ ID NO: 2234. In some embodiments, the variable heavy domain comprises the amino acid sequence of SEQ ID NO: 2235, and the variable light domain comprises the amino acid sequence of SEQ ID NO: 2237. In some embodiments, the variable heavy domain comprises the amino acid sequence of SEQ ID NO: 179, and the variable light domain comprises the amino acid sequence of SEQ ID NO: 1248. In some embodiments, the variable heavy domain comprises the amino acid sequence of SEQ ID NO: 2113, and the variable light domain comprises the amino acid sequence of SEQ ID NO: 2231. In some embodiments, the variable heavy domain comprises the amino acid sequence of SEQ ID NO: 1967, and the variable light domain comprises the amino acid sequence of SEQ ID NO: 1248. In some embodiments, the variable heavy domain comprises the amino acid sequence of any one of SEQ ID NOS: 1927-2132, and the variable light domain comprises the amino acid sequence of any one of SEQ ID NOS: 2133-2232. In some embodiments, the variable heavy domain and the variable light domain comprise the pair of anti-IL23 variable heavy domain and variable light domain in XENP53412, XENP53413, XENP53369, XENP53375, XENP53387, XENP53415, XENP53370, XENP53371, XENP53376, XENP53377, XENP53378, XENP53379, XENP53380, or XENP53414. In some embodiments, the variable heavy domain and the variable light domain comprise any pair of anti-IL23 variable heavy domain and variable light domain in Table 29 or 33. In some such antibodies, the variable heavy domain or the variable light domain can comprise variants of any of the above in which an N-terminal glutamine or glutamate is replaced with pyroglutamate. In some embodiments, the IL23 binding domain comprises a variant VH domain and/or variant VL domain having 1, 2, 3, 4, 5, 6, 7, 8, 9 or 10 amino acid changes from any of the above VH and VL domains. In some embodiments, the IL23 binding domain comprises a variant VH domain and/or variant VL domain at least 90%, 95%, 97%, 98%, or 99% identical to any of the above VH and VL domains. In some embodiments, the variant VH domain and/or VL domain has amino acid changes in a framework region (e.g., FR1, FR2, FR3, or FR4) but not in a CDR. In some embodiments, the changes are amino acid substitutions at one, two, three, or more of the following residues: (a) rare framework residues that differ between the murine antibody framework (i.e., donor antibody framework) and the human antibody framework (i.e., acceptor antibody framework); (b) Vernier zone residues when differing between donor antibody framework and acceptor antibody framework; (c) interchain packing residues at the VH/VL interface that differ between the donor antibody framework and the acceptor antibody framework; (d) canonical residues which differ between the donor antibody framework and the acceptor antibody framework sequences, particularly the framework regions crucial for the definition of the canonical class of the murine antibody CDR loops; (e) residues that are adjacent to a CDR; (g) residues capable of interacting with the antigen; (h) residues capable of interacting with the CDR; and (i) contact residues between the VH domain and the VL domain. In some embodiments, the substitutions are residues that are adjacent to a CDR, residues capable of interacting with the antigen, or residues capable of interacting with the CDR. In some embodiments, the VL sequence includes 66V (i.e., a V at position 66) and/or 105Y (i.e., a Y at position 105) as numbered by Kabat. In some embodiments, the VL sequence includes 66V and 105Y In certain embodiments, the IL23 binding domain is capable of binding to IL23, as measured at least one of a Biacore, surface plasmon resonance (SPR) and/or BLI (biolayer interferometry, e.g., Octet assay) assay, with the latter finding particular use in many embodiments. In particular embodiments, the IL23 binding domain is capable of binding human IL23p19 antigen (see SEQ ID NO: 1). In particular embodiments, the antibody specifically binds human IL23 with a K_{D} of less than about 1.1E-10 M as measured by surface plasmon resonance at 25° C., optionally wherein the antibody specifically binds human TL23 with a K_{D} of less than about 6E-11 M, less than about 5.9E-11 M, less than about 5.8E-11 M, or less than about 5.7E-11 M. In some embodiments, an antibody disclosed herein specifically binds human IL23 with a K_{D} of between about 2.4E-11 and about 1E-10 M or between about 2.4E-11 and about 5.7E-11 M as measured by surface plasmon resonance or Biacore at 25° C. In some embodiments, an antibody disclosed herein specifically binds human IL23 with a K_{D} of between about 5E-11 and about 6E-11 M as measured by surface plasmon resonance or Biacore at 25° C. In particular embodiments, the antibody inhibits IL23 activity in an IL23 luciferase reporter assay with an IC₅₀ of less than about 65 pM, less than about 64 pM, or less than about 63 pM, optionally wherein the antibody inhibits IL23 activity with an IC₅₀ of less than about 60 pM, less than about 59 pM, less than about 58 pM, less than about 57 pM, or less than about 56 pM. In some embodiments, an antibody disclosed herein inhibits IL23 activity in an IL23 luciferase reporter assay with an IC₅₀ of between about 47 pM and about 63 pM or between about 50 pM and about 60 pM.

[0310] In some embodiments, an TL23 binding domain comprises a variable heavy domain comprising a vhCDR1, a vhCDR2, and a vhCDR3 contained within a variable heavy domain comprising the amino acid sequence of SEQ ID NO: 2233, and a variable light domain comprising a vlCDR1, a vlCDR2, and a vlCDR3 contained within a variable light domain comprising the amino acid sequence of SEQ ID NO: 2234. In some embodiments, the CDRs are as defined by Kabat. In other embodiments, the CDRs are as defined by Chothia, Kabat+Chothia, AbM, contact, or IMGT. In some embodiments, the variable heavy domain comprises a vhCDR1 comprising the amino acid sequence of SEQ ID NO: 180, a vhCDR2 comprising the amino acid sequence of SEQ ID NO: 181, and a vhCDR3 comprising the amino acid sequence of SEQ ID NO: 182, and the variable light domain comprises a vlCDR1 comprising the amino acid sequence of SEQ ID NO: 184, a vlCDR2 comprising the amino acid sequence of SEQ ID NO: 1249, and a vlCDR3 comprising the amino acid sequence of SEQ ID NO: 1250. In some embodiments, an IL23 binding domain comprises a set of 6 CDRs with 1, 2, 3, 4, 5, 6, 7, 8, 9, 10 amino acid modifications as compared to the 6 CDRs of any of the above IL23 binding domains. That is, the CDRs can be modified as long as the total number of changes in the set of 6 CDRs is less than 11 amino acid modifications, with any combination of CDRs being changed (e.g., there may be one change in vlCDR1, two in vhCDR2, none in vhCDR3, etc.). In some embodiments, an IL23 binding domain comprises a set of 6 CDRs that are at least 90, 95, 97, 98 or 99% identical to the 6 CDRs of any of the above TL23 binding domains. In some embodiments, the variable heavy domain comprises the amino acid sequence of SEQ ID NO: 2233, and the variable light domain comprises the amino acid sequence of SEQ ID NO: 2234. In some such antibodies, the variable heavy domain or the variable light domain can comprise variants of any of the above in which an N-terminal glutamine or glutamate is replaced with pyroglutamate. In some embodiments, the IL23 binding domain comprises a variant VH domain and/or variant VL domain having 1, 2, 3, 4, 5, 6, 7, 8, 9 or 10 amino acid changes from any of the above VH and VL domains. In some embodiments, the IL23 binding domain comprises a variant VH domain and/or variant VL domain at least 90%, 95%, 97%, 98%, or 99% identical to any of the above VH and VL domains. In some embodiments, the variant VH domain and/or VL domain has amino acid changes in a framework region (e.g., FR1, FR2, FR3, or FR4) but not in a CDR. In some embodiments, the changes are amino acid substitutions at one, two, three, or more of the following residues: (a) rare framework residues that differ between the murine antibody framework (i.e., donor antibody framework) and the human antibody framework (i.e., acceptor antibody framework); (b) Vernier zone residues when differing between donor antibody framework and acceptor antibody framework; (c) interchain packing residues at the VH/VL interface that differ between the donor antibody framework and the acceptor antibody framework; (d) canonical residues which differ between the donor antibody framework and the acceptor antibody framework sequences, particularly the framework regions crucial for the definition of the canonical class of the murine antibody CDR loops; (e) residues that are adjacent to a CDR; (g) residues capable of interacting with the antigen; (h) residues capable of interacting with the CDR; and (i) contact residues between the VH domain and the VL domain. In some embodiments, the substitutions are residues that are adjacent to a CDR, residues capable of interacting with the antigen, or residues capable of interacting with the CDR. In some embodiments, the VL sequence includes 66V (i.e., a V at position 66) and/or 105Y (i.e., a Y at position 105) as numbered by Kabat. In some embodiments, the VL sequence includes 66V and 105Y In certain embodiments, the IL23 binding domain is capable of binding to IL23, as measured at least one of a Biacore, surface plasmon resonance (SPR) and/or BLI (biolayer interferometry, e.g., Octet assay) assay, with the latter finding particular use in many embodiments. In particular embodiments, the IL23 binding domain is capable of binding human IL23p19 antigen (see SEQ ID NO: 1).

[0311] In some embodiments, an IL23 binding domain comprises a variable heavy domain comprising a vhCDR1, a vhCDR2, and a vhCDR3 contained within a variable heavy domain comprising the amino acid sequence of SEQ ID NO: 2235, and a variable light domain comprising a vlCDR1, a vlCDR2, and a vlCDR3 contained within a variable light domain comprising the amino acid sequence of SEQ ID NO: 2237. In some embodiments, the CDRs are as defined by Kabat. In other embodiments, the CDRs are as defined by Chothia, Kabat+Chothia, AbM, contact, or IMGT. In some embodiments, the variable heavy domain comprises a vhCDR1 comprising the amino acid sequence of SEQ ID NO: 180, a vhCDR2 comprising the amino acid sequence of SEQ ID NO: 181, and a vhCDR3 comprising the amino acid sequence of SEQ ID NO: 2236, and the variable light domain comprises a vlCDR1 comprising the amino acid sequence of SEQ ID NO: 184, a vlCDR2 comprising the amino acid sequence of SEQ ID NO: 2238, and a vlCDR3 comprising the amino acid sequence of SEQ ID NO: 1250. In some embodiments, an IL23 binding domain comprises a set of 6 CDRs with 1, 2, 3, 4, 5, 6, 7, 8, 9, 10 amino acid modifications as compared to the 6 CDRs of any of the above IL23 binding domains. That is, the CDRs can be modified as long as the total number of changes in the set of 6 CDRs is less than 11 amino acid modifications, with any combination of CDRs being changed (e.g., there may be one change in vlCDR1, two in vhCDR2, none in vhCDR3, etc.). In some embodiments, an TL23 binding domain comprises a set of 6 CDRs that are at least 90, 95, 97, 98 or 99% identical to the 6 CDRs of any of the above IL23 binding domains. In some embodiments, the variable heavy domain comprises the amino acid sequence of SEQ ID NO: 2235, and the variable light domain comprises the amino acid sequence of SEQ ID NO: 2237. In some such antibodies, the variable heavy domain or the variable light domain can comprise variants of any of the above in which an N-terminal glutamine or glutamate is replaced with pyroglutamate. In some embodiments, the TL23 binding domain comprises a variant VH domain and/or variant VL domain having 1, 2, 3, 4, 5, 6, 7, 8, 9 or 10 amino acid changes from any of the above VH and VL domains. In some embodiments, the TL23 binding domain comprises a variant VH domain and/or variant VL domain at least 90%, 95%, 97%, 98%, or 99% identical to any of the above VH and VL domains. In some embodiments, the variant VH domain and/or VL domain has amino acid changes in a framework region (e.g., FR1, FR2, FR3, or FR4) but not in a CDR. In some embodiments, the changes are amino acid substitutions at one, two, three, or more of the following residues: (a) rare framework residues that differ between the murine antibody framework (i.e., donor antibody framework) and the human antibody framework (i.e., acceptor antibody framework); (b) Vernier zone residues when differing between donor antibody framework and acceptor antibody framework; (c) interchain packing residues at the VH/VL interface that differ between the donor antibody framework and the acceptor antibody framework; (d) canonical residues which differ between the donor antibody framework and the acceptor antibody framework sequences, particularly the framework regions crucial for the definition of the canonical class of the murine antibody CDR loops; (e) residues that are adjacent to a CDR; (g) residues capable of interacting with the antigen; (h) residues capable of interacting with the CDR; and (i) contact residues between the VH domain and the VL domain. In some embodiments, the substitutions are residues that are adjacent to a CDR, residues capable of interacting with the antigen, or residues capable of interacting with the CDR. In some embodiments, the VL sequence includes 66V (i.e., a V at position 66) and/or 105Y (i.e., a Y at position 105) as numbered by Kabat. In some embodiments, the VL sequence includes 66V and 105Y In certain embodiments, the IL23 binding domain is capable of binding to IL23, as measured at least one of a Biacore, surface plasmon resonance (SPR) and/or BLI (biolayer interferometry, e.g., Octet assay) assay, with the latter finding particular use in many embodiments. In particular embodiments, the IL23 binding domain is capable of binding human IL23p19 antigen (see SEQ ID NO: 1).

[0312] In some embodiments, an IL23 binding domain comprises a variable heavy domain comprising a vhCDR1, a vhCDR2, and a vhCDR3 contained within a variable heavy domain comprising the amino acid sequence of SEQ ID NO: 179, and a variable light domain comprising a vlCDR1, a vlCDR2, and a vlCDR3 contained within a variable light domain comprising the amino acid sequence of SEQ ID NO: 1248. In some embodiments, the CDRs are as defined by Kabat. In other embodiments, the CDRs are as defined by Chothia, Kabat+Chothia, AbM, contact, or IMGT. In some embodiments, the variable heavy domain comprises a vhCDR1 comprising the amino acid sequence of SEQ ID NO: 180, a vhCDR2 comprising the amino acid sequence of SEQ ID NO: 181, and a vhCDR3 comprising the amino acid sequence of SEQ ID NO: 182, and the variable light domain comprises a vlCDR1 comprising the amino acid sequence of SEQ ID NO: 184, a vlCDR2 comprising the amino acid sequence of SEQ ID NO: 1249, and a vlCDR3 comprising the amino acid sequence of SEQ ID NO: 1250. In some embodiments, an IL23 binding domain comprises a set of 6 CDRs with 1, 2, 3, 4, 5, 6, 7, 8, 9, 10 amino acid modifications as compared to the 6 CDRs of any of the above IL23 binding domains. That is, the CDRs can be modified as long as the total number of changes in the set of 6 CDRs is less than 11 amino acid modifications, with any combination of CDRs being changed (e.g., there may be one change in vlCDR1, two in vhCDR2, none in vhCDR3, etc.). In some embodiments, an IL23 binding domain comprises a set of 6 CDRs that are at least 90, 95, 97, 98 or 99% identical to the 6 CDRs of any of the above TL23 binding domains. In some embodiments, the variable heavy domain comprises the amino acid sequence of SEQ ID NO: 179, and the variable light domain comprises the amino acid sequence of SEQ ID NO: 1248. In some such antibodies, the variable heavy domain or the variable light domain can comprise variants of any of the above in which an N-terminal glutamine or glutamate is replaced with pyroglutamate. In some embodiments, the IL23 binding domain comprises a variant VH domain and/or variant VL domain having 1, 2, 3, 4, 5, 6, 7, 8, 9 or 10 amino acid changes from any of the above VH and VL domains. In some embodiments, the TL23 binding domain comprises a variant VH domain and/or variant VL domain at least 90%, 95%, 97%, 98%, or 99% identical to any of the above VH and VL domains. In some embodiments, the variant VH domain and/or VL domain has amino acid changes in a framework region (e.g., FR1, FR2, FR3, or FR4) but not in a CDR. In some embodiments, the changes are amino acid substitutions at one, two, three, or more of the following residues: (a) rare framework residues that differ between the murine antibody framework (i.e., donor antibody framework) and the human antibody framework (i.e., acceptor antibody framework); (b) Vernier zone residues when differing between donor antibody framework and acceptor antibody framework; (c) interchain packing residues at the VH/VL interface that differ between the donor antibody framework and the acceptor antibody framework; (d) canonical residues which differ between the donor antibody framework and the acceptor antibody framework sequences, particularly the framework regions crucial for the definition of the canonical class of the murine antibody CDR loops; (e) residues that are adjacent to a CDR; (g) residues capable of interacting with the antigen; (h) residues capable of interacting with the CDR; and (i) contact residues between the VH domain and the VL domain. In some embodiments, the substitutions are residues that are adjacent to a CDR, residues capable of interacting with the antigen, or residues capable of interacting with the CDR. In some embodiments, the VL sequence includes 66V (i.e., a V at position 66) and/or 105Y (i.e., a Y at position 105) as numbered by Kabat. In some embodiments, the VL sequence includes 66V and 105Y In certain embodiments, the IL23 binding domain is capable of binding to IL23, as measured at least one of a Biacore, surface plasmon resonance (SPR) and/or BLI (biolayer interferometry, e.g., Octet assay) assay, with the latter finding particular use in many embodiments. In particular embodiments, the TL23 binding domain is capable of binding human IL23p19 antigen (see SEQ ID NO: 1).

[0313] In some embodiments, an anti-IL23 antibody or an anti-TL1A×anti-IL23 antibody comprises a heavy chain comprising the amino acid sequence of SEQ ID NO: 2244 or a variant thereof in which the N-terminal glutamine is replaced with pyroglutamate and/or the C-terminal lysine or the C-terminal lysine and glycine are removed, and a light chain comprising the amino acid sequence of SEQ ID NO: 2245. In some embodiments, an anti-IL23 antibody or an anti-TL1A×anti-IL23 antibody comprises a heavy chain comprising the amino acid sequence of SEQ ID NO: 2250 or a variant thereof in which the N-terminal glutamine is replaced with pyroglutamate and/or the C-terminal lysine or the C-terminal lysine and glycine are removed, and a light chain comprising the amino acid sequence of SEQ ID NO: 2251. In some embodiments, an anti-IL23 antibody or an anti-TL1A×anti-IL23 antibody comprises a heavy chain comprising the amino acid sequence of SEQ ID NO: 2266 or a variant thereof in which the N-terminal glutamine is replaced with pyroglutamate and/or the C-terminal lysine or the C-terminal lysine and glycine are removed, and a light chain comprising the amino acid sequence of SEQ ID NO: 2267. In some embodiments, an anti-IL23 antibody or an anti-TL1A×anti-IL23 antibody comprises an anti-IL23 heavy chain and light chain pair from XENP53412, XENP53413, XENP53369, XENP53375, XENP53387, XENP53415, XENP53370, XENP53371, XENP53376, XENP53377, XENP53378, XENP53379, XENP53380, or XENP53414, or heavy chain variants thereof in which the N-terminal glutamine is replaced with pyroglutamate and/or the C-terminal lysine or the C-terminal lysine and glycine are removed. In some embodiments, an anti-IL23 antibody or an anti-TL1A×anti-IL23 antibody comprises a heavy chain and/or a light chain having 1, 2, 3, 4, 5, 6, 7, 8, 9 or 10 amino acid changes from any of the above heavy chains and light chains. In some embodiments, an anti-IL23 antibody or an anti-TL1A×anti-IL23 antibody comprises a heavy chain and/or a light chain at least 90%, 95%, 97%, 98%, or 99% identical to any of the above heavy chains and light chains. In some embodiments, the VL sequence includes 66V (i.e., a V at position 66) and/or 105Y (i.e., a Y at position 105) as numbered by Kabat. In some embodiments, the VL sequence includes 66V and 105Y. In some embodiments, the amino acid changes are in a constant region but not in a variable region. In some embodiments, the amino acid changes are in a constant region or in a framework region (e.g., FR1, FR2, FR3, or FR4) but not in a CDR. In some embodiments, the changes are amino acid substitutions at one, two, three, or more of the following residues: (a) rare framework residues that differ between the murine antibody framework (i.e., donor antibody framework) and the human antibody framework (i.e., acceptor antibody framework); (b) Vernier zone residues when differing between donor antibody framework and acceptor antibody framework; (c) interchain packing residues at the VH/VL interface that differ between the donor antibody framework and the acceptor antibody framework; (d) canonical residues which differ between the donor antibody framework and the acceptor antibody framework sequences, particularly the framework regions crucial for the definition of the canonical class of the murine antibody CDR loops; (e) residues that are adjacent to a CDR; (g) residues capable of interacting with the antigen; (h) residues capable of interacting with the CDR; and (i) contact residues between the VH domain and the VL domain. In some embodiments, the substitutions are residues that are adjacent to a CDR, residues capable of interacting with the antigen, or residues capable of interacting with the CDR. In some embodiments, the VL sequence includes 66V (i.e., a V at position 66) and/or 105Y (i.e., a Y at position 105) as numbered by Kabat. In some embodiments, the VL sequence includes 66V and 105Y In certain embodiments, the IL23 binding domain is capable of binding to IL23, as measured at least one of a Biacore, surface plasmon resonance (SPR) and/or BLI (biolayer interferometry, e.g., Octet assay) assay, with the latter finding particular use in many embodiments. In particular embodiments, the IL23 binding domain is capable of binding human IL23p19 antigen (see SEQ ID NO: 1).

### C. Chimeric and Humanized Antibodies

[0314] In certain embodiments, the subject antibodies provided herein include a heavy chain variable region from a particular germline heavy chain immunoglobulin gene and/or a light chain variable region from a particular germline light chain immunoglobulin gene. For example, such antibodies may comprise or consist of a human antibody comprising heavy or light chain variable regions that are “the product of” or “derived from” a particular germline sequence. A human antibody that is “the product of” or “derived from” a human germline immunoglobulin sequence can be identified as such by comparing the amino acid sequence of the human antibody to the amino acid sequences of human germline immunoglobulins and selecting the human germline immunoglobulin sequence that is closest in sequence (i.e., greatest % identity) to the sequence of the human antibody (using the methods outlined herein). A human antibody that is “the product of” or “derived from” a particular human germline immunoglobulin sequence may contain amino acid differences as compared to the germline sequence, due to, for example, naturally-occurring somatic mutations or intentional introduction of site-directed mutation. However, a humanized antibody typically is at least 90% identical in amino acids sequence to an amino acid sequence encoded by a human germline immunoglobulin gene and contains amino acid residues that identify the antibody as being derived from human sequences when compared to the germline immunoglobulin amino acid sequences of other species (e.g., murine germline sequences). In certain cases, a humanized antibody may be at least 95, 96, 97, 98 or 99%, or even at least 96%, 97%, 98%, or 99% identical in amino acid sequence to the amino acid sequence encoded by the germline immunoglobulin gene. Typically, a humanized antibody derived from a particular human germline sequence will display no more than 10-20 amino acid differences from the amino acid sequence encoded by the human germline immunoglobulin gene (prior to the introduction of any skew, pI and ablation variants herein; that is, the number of variants is generally low, prior to the introduction of the variants of the invention). In certain cases, the humanized antibody may display no more than 5, or even no more than 4, 3, 2, or 1 amino acid difference from the amino acid sequence encoded by the germline immunoglobulin gene (again, prior to the introduction of any skew, pI and ablation variants herein; that is, the number of variants is generally low, prior to the introduction of the variants of the invention).

[0315] In one embodiment, the parent antibody has been affinity matured. Structure-based methods may be employed for humanization and affinity maturation, for example as described in US 2006-0008883 A1, incorporated by reference in its entirety for all purposes. Selection based methods may be employed to humanize and/or affinity mature antibody variable regions, including but not limited to methods described in Wu et al., 1999, J. Mol. Biol. 294:151-162; Baca et al., 1997, J. Biol. Chem. 272(16):10678-10684; Rosok et al., 1996, J. Biol. Chem. 271(37): 22611-22618; Rader et al., 1998, Proc. Natl. Acad. Sci. USA 95: 8910-8915; Krauss et al., 2003, Protein Engineering 16(10):753-759, all entirely incorporated by reference. Other humanization methods may involve the grafting of only parts of the CDRs, including but not limited to methods described in U.S. Ser. No. 09/810,510; Tan et al., 2002, J. Immunol. 169:1119-1125; De Pascalis et al., 2002, J. Immunol. 169:3076-3084, all entirely incorporated by reference.

### D. Bispecific and Heterodimeric Antibodies

[0316] Provided herein are bispecific and heterodimeric anti-TL1A×anti-IL23 antibodies comprising a TL1A binding domain and an IL23 binding domain as described elsewhere herein.

[0317] In exemplary embodiments, the anti-TL1A×anti-IL23 antibodies provided herein are heterodimeric bispecific antibodies that include two variant Fc domain sequences. Such variant Fc domains include amino acid modifications to facilitate the self-assembly and/or purification of the heterodimeric antibodies. Such bispecific antibodies can also include variant heavy chain constant domain sequences (e.g., CH1) and variant light chain constant domain sequences. Likewise, such bispecific antibodies can also include variant variable heavy domain sequences and variant variable light domain sequences. Such variant sequences can include, for example, amino acid modifications to facilitate the self-assembly of the heterodimeric antibodies (e.g., favor heterodimeric formation and/or correct heavy chain/light chain pairing).

[0318] Exemplary bispecific antibodies are provided in Tables 44 and 29-34. For example, an anti-TL1A×anti-IL23 antibody can comprise the TL1A binding domain and the IL23 binding domain from any bispecific antibody in Tables 44 and 29-34 or variants thereof as described elsewhere herein.

[0319] In some embodiments, the anti-TL1A variable heavy domain and the variable light domain and the anti-IL23 variable heavy domain and variable light domain comprise the set of CDRs in the pair of anti-TL1A variable heavy domain and variable light domain and the pair of anti-IL23 variable heavy domain and variable light domain in XENP53412, XENP53413, XENP53369, XENP53375, XENP53387, XENP53415, XENP53370, XENP53371, XENP53376, XENP53377, XENP53378, XENP53379, XENP53380, or XENP53414. In some embodiments, the anti-TL1A variable heavy domain and the variable light domain and the anti-IL23 variable heavy domain and variable light domain comprise the set of CDRs in the pair of anti-TL1A variable heavy domain and variable light domain and the pair of anti-IL23 variable heavy domain and variable light domain in an anti-TL1A×anti-IL23 antibody in Table 44. In some embodiments, the CDRs are as defined by Kabat. In other embodiments, the CDRs are as defined by Chothia, Kabat+Chothia, AbM, contact, or IMGT. In some embodiments, a TL1A binding domain or an anti-IL23 binding domain comprises a set of 6 CDRs with 1, 2, 3, 4, 5, 6, 7, 8, 9, 10 amino acid modifications as compared to the 6 CDRs of any of the above TL1A binding or IL23 binding domains. That is, the CDRs can be modified as long as the total number of changes in the set of 6 CDRs is less than 11 amino acid modifications, with any combination of CDRs being changed (e.g., there may be one change in vlCDR1, two in vhCDR2, none in vhCDR3, etc.). In some embodiments, a TL1A binding domain or IL23 binding domain comprises a set of 6 CDRs that are at least 90, 95, 97, 98 or 99% identical to the 6 CDRs of any of the above TL1A binding domains or IL23 binding domains. Regarding the TL1A binding domain, in some embodiments, the VH sequence includes 53Y (i.e., a Y at position 53) and/or 100V (i.e., a V at position 100) as numbered by Kabat. In some embodiments, the VH sequence includes 53Y and 100V. In some embodiments, the VL sequence includes 120Q (i.e., a Q at position 120) as numbered by Kabat. In certain embodiments, the TL1A binding domain is capable of binding to TL1A, as measured at least one of a Biacore, surface plasmon resonance (SPR) and/or BLI (biolayer interferometry, e.g., Octet assay) assay, with the latter finding particular use in many embodiments. In particular embodiments, the TL1a ABD is capable of binding human TL1A antigen (see SEQ ID NO: 4). In particular embodiments, the antibody specifically binds human TL1A with a K_{D} of less than about 6.5E-11 M, less than about 6.4 E-11 M, or less than about 6.3E-11 as measured by surface plasmon resonance at 25° C., optionally wherein the antibody specifically binds human TL1A with a K_{D} of less than about 3E-11 M, less than about 2.9E-11 M, less than about 2.8E-11 M, or less than about 2.7E-11 M. In some embodiments, an antibody disclosed herein specifically binds human TL1A with a K_{D} of between about 2E-11 M and about 7E-11M, between about 2.5E-11 M and about 7E-11 M, or between about 2.5E-11 M and about 6.5E-11 M as measured by surface plasmon resonance or Biacore at 25° C. In some embodiments, an antibody disclosed herein specifically binds human TL1A with a K_{D} of between about 2.5E-11 M and about 3.5E-11 M, between about 2.5E-11 M and about 3E-11 M, or between about 2.5E-11 M and about 2.7E-11 M as measured by surface plasmon resonance or Biacore at 25° C. In particular embodiments, the antibody the antibody inhibits TL1A activity in a TL1A luciferase reporter assay with an IC₅₀ of less than about 4.5 nM. In some embodiments, an antibody disclosed herein inhibits TL1A activity in a TL1A luciferase reporter assay with an IC₅₀ of between about 2.5 nM and about 4.5 nM, between about 3.5 nM and about 5.5 nM, or between about 4 nM and about 5 nM. Regarding the TL23 binding domain, in some embodiments, the VL sequence includes 66V (i.e., a V at position 66) and/or 105Y (i.e., a Y at position 105) as numbered by Kabat. In some embodiments, the VL sequence includes 66V and 105Y In certain embodiments, the IL23 antigen binding domain is capable of binding IL23 antigen, as measured by at least one of a Biacore, surface plasmon resonance (SPR) and/or BLI (biolayer interferometry, e.g., Octet assay) assay, with the latter finding particular use in many embodiments. In particular embodiments, the IL23 binding domain is capable of binding human IL23p19 antigen (see SEQ ID NO: 1). In particular embodiments, the antibody specifically binds human IL23 with a K_{D} of less than about 1.1E-10 M as measured by surface plasmon resonance at 25° C., optionally wherein the antibody specifically binds human IL23 with a K_{D} of less than about 6E-11 M, less than about 5.9E-11 M, less than about 5.8E-11 M, or less than about 5.7E-11 M. In some embodiments, an antibody disclosed herein specifically binds human IL23 with a K_{D} of between about 2.4E-11 and about 1E-10 M or between about 2.4E-11 and about 5.7E-11 M as measured by surface plasmon resonance or Biacore at 25° C. In some embodiments, an antibody disclosed herein specifically binds human IL23 with a K_{D} of between about 5E-11 and about 6E-11 M as measured by surface plasmon resonance or Biacore at 25° C. In particular embodiments, the antibody inhibits IL23 activity in an IL23 luciferase reporter assay with an IC₅₀ of less than about 65 pM, less than about 64 pM, or less than about 63 pM, optionally wherein the antibody inhibits TL23 activity with an IC₅₀ of less than about 60 pM, less than about 59 pM, less than about 58 pM, less than about 57 pM, or less than about 56 pM. In some embodiments, an antibody disclosed herein inhibits IL23 activity in an IL23 luciferase reporter assay with an IC₅₀ of between about 47 pM and about 63 pM or between about 50 pM and about 60 pM.

[0320] In some embodiments, the anti-TL1A variable heavy domain and the variable light domain and the anti-IL23 variable heavy domain and variable light domain comprise the pair of anti-TL1A variable heavy domain and variable light domain and the pair of anti-IL23 variable heavy domain and variable light domain in XENP53412, XENP53413, XENP53369, XENP53375, XENP53387, XENP53415, XENP53370, XENP53371, XENP53376, XENP53377, XENP53378, XENP53379, XENP53380, or XENP53414. In some embodiments, the anti-TL1A variable heavy domain and the variable light domain and the anti-IL23 variable heavy domain and variable light domain comprise the pair of anti-TL1A variable heavy domain and variable light domain and the pair of anti-IL23 variable heavy domain and variable light domain in Table 44. In some such antibodies, the anti-TL1A variable heavy domain or variable light domain or the anti-IL23 variable heavy domain or variable light domain can comprise variants of any of the above in which an N-terminal glutamine or glutamate is replaced with pyroglutamate. In some embodiments, the TL1A binding domain or the TL23 binding domain comprises a variant VH domain and/or variant VL domain having 1, 2, 3, 4, 5, 6, 7, 8, 9 or 10 amino acid changes from any of the above VH and VL domains. In some embodiments, the TL1A binding domain or the IL23 binding domain comprises a variant VH domain and/or variant VL domain at least 90%, 95%, 97%, 98%, or 99% identical to any of the above VH and VL domains. In some embodiments, the variant VH domain and/or VL domain has amino acid changes in a framework region (e.g., FR1, FR2, FR3, or FR4) but not in a CDR. In some embodiments, the changes are amino acid substitutions at one, two, three, or more of the following residues: (a) rare framework residues that differ between the murine antibody framework (i.e., donor antibody framework) and the human antibody framework (i.e., acceptor antibody framework); (b) Vernier zone residues when differing between donor antibody framework and acceptor antibody framework; (c) interchain packing residues at the VH/VL interface that differ between the donor antibody framework and the acceptor antibody framework; (d) canonical residues which differ between the donor antibody framework and the acceptor antibody framework sequences, particularly the framework regions crucial for the definition of the canonical class of the murine antibody CDR loops; (e) residues that are adjacent to a CDR; (g) residues capable of interacting with the antigen; (h) residues capable of interacting with the CDR; and (i) contact residues between the VH domain and the VL domain. In some embodiments, the substitutions are residues that are adjacent to a CDR, residues capable of interacting with the antigen, or residues capable of interacting with the CDR. Regarding the TL1A binding domain, in some embodiments, the VH sequence includes 53Y (i.e., a Y at position 53) and/or 100V (i.e., a V at position 100) as numbered by Kabat. In some embodiments, the VH sequence includes 53Y and 100V. In some embodiments, the VL sequence includes 120Q (i.e., a Q at position 120) as numbered by Kabat. In certain embodiments, the TL1A binding domain is capable of binding to TL1A, as measured at least one of a Biacore, surface plasmon resonance (SPR) and/or BLI (biolayer interferometry, e.g., Octet assay) assay, with the latter finding particular use in many embodiments. In particular embodiments, the TL1a ABD is capable of binding human TL1A antigen (see SEQ ID NO: 4). In particular embodiments, the antibody specifically binds human TL1A with a K_{D} of less than about 6.5E-11 M, less than about 6.4 E-11 M, or less than about 6.3E-11 as measured by surface plasmon resonance at 25° C., optionally wherein the antibody specifically binds human TL1A with a K_{D} of less than about 3E-11 M, less than about 2.9E-11 M, less than about 2.8E-11 M, or less than about 2.7E-11 M. In some embodiments, an antibody disclosed herein specifically binds human TL1A with a K_{D} of between about 2E-11 M and about 7E-11M, between about 2.5E-11 M and about 7E-11 M, or between about 2.5E-11 M and about 6.5E-11 M as measured by surface plasmon resonance or Biacore at 25° C. In some embodiments, an antibody disclosed herein specifically binds human TL1A with a K_{D} of between about 2.5E-11 M and about 3.5E-11 M, between about 2.5E-11 M and about 3E-11 M, or between about 2.5E-11 M and about 2.7E-11 M as measured by surface plasmon resonance or Biacore at 25° C. In particular embodiments, the antibody the antibody inhibits TL1A activity in a TL1A luciferase reporter assay with an IC₅₀ of less than about 4.5 nM. In some embodiments, an antibody disclosed herein inhibits TL1A activity in a TL1A luciferase reporter assay with an IC₅₀ of between about 2.5 nM and about 4.5 nM, between about 3.5 nM and about 5.5 nM, or between about 4 nM and about 5 nM. Regarding the IL23 binding domain, in some embodiments, the VL sequence includes 66V (i.e., a V at position 66) and/or 105Y (i.e., a Y at position 105) as numbered by Kabat. In some embodiments, the VL sequence includes 66V and 105Y In certain embodiments, the IL23 binding domain is capable of binding to IL23, as measured at least one of a Biacore, surface plasmon resonance (SPR) and/or BLI (biolayer interferometry, e.g., Octet assay) assay, with the latter finding particular use in many embodiments. In particular embodiments, the IL23 binding domain is capable of binding human IL23p19 antigen (see SEQ ID NO: 1). In particular embodiments, the antibody specifically binds human IL23 with a K_{D} of less than about 1.1E-10 M as measured by surface plasmon resonance at 25° C., optionally wherein the antibody specifically binds human IL23 with a K_{D} of less than about 6E-11 M, less than about 5.9E-11 M, less than about 5.8E-11 M, or less than about 5.7E-11 M. In some embodiments, an antibody disclosed herein specifically binds human IL23 with a K_{D} of between about 2.4E-11 and about 1E-10 M or between about 2.4E-11 and about 5.7E-11 M as measured by surface plasmon resonance or Biacore at 25° C. In some embodiments, an antibody disclosed herein specifically binds human IL23 with a K_{D} of between about 5E-11 and about 6E-11 M as measured by surface plasmon resonance or Biacore at 25° C. In particular embodiments, the antibody inhibits IL23 activity in an IL23 luciferase reporter assay with an IC₅₀ of less than about 65 pM, less than about 64 pM, or less than about 63 pM, optionally wherein the antibody inhibits IL23 activity with an IC₅₀ of less than about 60 pM, less than about 59 pM, less than about 58 pM, less than about 57 pM, or less than about 56 pM. In some embodiments, an antibody disclosed herein inhibits IL23 activity in an IL23 luciferase reporter assay with an IC₅₀ of between about 47 pM and about 63 pM or between about 50 pM and about 60 pM.

[0321] In some embodiments, the anti-TL1A variable heavy domain and variable light domain are referred to as VH1 and VL1, and the anti-IL23 variable heavy domain and variable light domain are referred to as VH2 and VL2.

[0322] In some embodiments, the VH1 comprises a vhCDR1, a vhCDR2, and a vhCDR3 contained within a variable heavy domain comprising the amino acid sequence of any one of SEQ ID NOS: 2241, 2253, 2259, 1674, and 1200, (ii) the VL1 comprises a vlCDR1, a vlCDR2, and a vlCDR3 contained within a variable light domain comprising the amino acid sequence of any one of SEQ ID NOS: 2243 and 1204, (iii) the VH2 comprises a vhCDR1, a vhCDR2, and a vhCDR3 contained within a variable heavy domain comprising the amino acid sequence of any one of SEQ ID NOS: 2233, 2235, and 179, and (iv) the VL2 comprises a vlCDR1, a vlCDR2, and a vlCDR3 contained within a variable light domain comprising the amino acid sequence of any one of SEQ ID NOS: 2234, 2237, and 1248. In some embodiments, the CDRs are as defined by Kabat. In other embodiments, the CDRs are as defined by Chothia, Kabat+Chothia, AbM, contact, or IMGT. In some embodiments, the VH1 comprises a vhCDR1 comprising the amino acid sequence of SEQ ID NO: 102 or 1201, a vhCDR2 comprising the amino acid sequence of SEQ ID NO: 1924 or 1202, and a vhCDR3 comprising the amino acid sequence of SEQ ID NO: 1203 or 104, (ii) the VL1 comprises a vlCDR1 comprising the amino acid sequence of SEQ ID NO: 106, a vlCDR2 comprising the amino acid sequence of SEQ ID NO: 107, and a vlCDR3 comprising the amino acid sequence of SEQ ID NO: 108, (iii) the VH2 comprises a vhCDR1 comprising the amino acid sequence of SEQ ID NO: 180, a vhCDR2 comprising the amino acid sequence of SEQ ID NO: 181, and a vhCDR3 comprising the amino acid sequence of SEQ ID NO: 182 or 2236, and (iv) the VL2 comprises a vlCDR1 comprising the amino acid sequence of SEQ ID NO: 184, a vlCDR2 comprising the amino acid sequence of SEQ ID NO: 1249 or 2238, and a vlCDR3 comprising the amino acid sequence of SEQ ID NO: 1250. In some embodiments, a binding domain comprises a set of 6 CDRs with 1, 2, 3, 4, 5, 6, 7, 8, 9, 10 amino acid modifications as compared to the 6 CDRs of any of the above binding domains. That is, the CDRs can be modified as long as the total number of changes in the set of 6 CDRs is less than 11 amino acid modifications, with any combination of CDRs being changed (e.g., there may be one change in vlCDR1, two in vhCDR2, none in vhCDR3, etc.). In some embodiments, a binding domain comprises a set of 6 CDRs that are at least 90, 95, 97, 98 or 99% identical to the 6 CDRs of any of the above binding domains. In some embodiments, the VH1 comprises the amino acid sequence of any one of SEQ ID NOS: 2241, 2253, 2259, 1674, and 1200, (ii) the VL1 comprises the amino acid sequence of any one of SEQ ID NOS: 2243 and 1204, (iii) the VH2 comprises the amino acid sequence of any one of SEQ ID NOS: 2233, 2235, and 179, and (iv) the VL2 comprises the amino acid sequence of any one of SEQ ID NOS: 2234, 2237, and 1248. In some such antibodies, the variable heavy domain or the variable light domain can comprise variants of any of the above in which an N-terminal glutamine or glutamate is replaced with pyroglutamate. In some embodiments, a binding domain comprises a variant VH domain and/or variant VL domain having 1, 2, 3, 4, 5, 6, 7, 8, 9 or 10 amino acid changes from any of the above VH and VL domains. In some embodiments, a binding domain comprises a variant VH domain and/or variant VL domain at least 90%, 95%, 97%, 98%, or 99% identical to any of the above VH and VL domains. In some embodiments, the variant VH domain and/or VL domain has amino acid changes in a framework region (e.g., FR1, FR2, FR3, or FR4) but not in a CDR. In some embodiments, the changes are amino acid substitutions at one, two, three, or more of the following residues: (a) rare framework residues that differ between the murine antibody framework (i.e., donor antibody framework) and the human antibody framework (i.e., acceptor antibody framework); (b) Vernier zone residues when differing between donor antibody framework and acceptor antibody framework; (c) interchain packing residues at the VH/VL interface that differ between the donor antibody framework and the acceptor antibody framework; (d) canonical residues which differ between the donor antibody framework and the acceptor antibody framework sequences, particularly the framework regions crucial for the definition of the canonical class of the murine antibody CDR loops; (e) residues that are adjacent to a CDR; (g) residues capable of interacting with the antigen; (h) residues capable of interacting with the CDR; and (i) contact residues between the VH domain and the VL domain. In some embodiments, the substitutions are residues that are adjacent to a CDR, residues capable of interacting with the antigen, or residues capable of interacting with the CDR. Regarding the TL1A binding domain, in some embodiments, the VH sequence includes 53Y (i.e., a Y at position 53) and/or 100V (i.e., a V at position 100) as numbered by Kabat. In some embodiments, the VH sequence includes 53Y and 100V. In some embodiments, the VL sequence includes 120Q (i.e., a Q at position 120) as numbered by Kabat. In certain embodiments, the TL1A binding domain is capable of binding to TL1A, as measured at least one of a Biacore, surface plasmon resonance (SPR) and/or BLI (biolayer interferometry, e.g., Octet assay) assay, with the latter finding particular use in many embodiments. In particular embodiments, the TL1a ABD is capable of binding human TL1A antigen (see SEQ ID NO: 4). Regarding the IL23 binding domain, in some embodiments, the VL sequence includes 66V (i.e., a V at position 66) and/or 105Y (i.e., a Y at position 105) as numbered by Kabat. In some embodiments, the VL sequence includes 66V and 105Y In certain embodiments, the IL23 binding domain is capable of binding to IL23, as measured at least one of a Biacore, surface plasmon resonance (SPR) and/or BLI (biolayer interferometry, e.g., Octet assay) assay, with the latter finding particular use in many embodiments. In particular embodiments, the IL23 binding domain is capable of binding human IL23p19 antigen (see SEQ ID NO: 1).

[0323] In some embodiments, the VH1 comprises a vhCDR1, a vhCDR2, and a vhCDR3 contained within a variable heavy domain comprising the amino acid sequence of SEQ ID NO: 2241, (ii) the VL1 comprises a vlCDR1, a vlCDR2, and a vlCDR3 contained within a variable light domain comprising the amino acid sequence of SEQ ID NO: 2243, (iii) the VH2 comprises a vhCDR1, a vhCDR2, and a vhCDR3 contained within a variable heavy domain comprising the amino acid sequence of SEQ ID NO: 2233, and (iv) the VL2 comprises a vlCDR1, a vlCDR2, and a vlCDR3 contained within a variable light domain comprising the amino acid sequence of SEQ ID NO: 2234. In some embodiments, the CDRs are as defined by Kabat. In other embodiments, the CDRs are as defined by Chothia, Kabat+Chothia, AbM, contact, or IMGT. In some embodiments, the VH1 comprises a vhCDR1 comprising the amino acid sequence of SEQ ID NO: 102, a vhCDR2 comprising the amino acid sequence of SEQ ID NO: 1924, and a vhCDR3 comprising the amino acid sequence of SEQ ID NO: 1203, (ii) the VL1 comprises a vlCDR1 comprising the amino acid sequence of SEQ ID NO: 106, a vlCDR2 comprising the amino acid sequence of SEQ ID NO: 107, and a vlCDR3 comprising the amino acid sequence of SEQ ID NO: 108, (iii) the VH2 comprises a vhCDR1 comprising the amino acid sequence of SEQ ID NO: 180, a vhCDR2 comprising the amino acid sequence of SEQ ID NO: 181, and a vhCDR3 comprising the amino acid sequence of SEQ ID NO: 182, and (iv) the VL2 comprises a vlCDR1 comprising the amino acid sequence of SEQ ID NO: 184, a vlCDR2 comprising the amino acid sequence of SEQ ID NO: 1249, and a vlCDR3 comprising the amino acid sequence of SEQ ID NO: 1250. In some embodiments, a binding domain comprises a set of 6 CDRs with 1, 2, 3, 4, 5, 6, 7, 8, 9, 10 amino acid modifications as compared to the 6 CDRs of any of the above binding domains. That is, the CDRs can be modified as long as the total number of changes in the set of 6 CDRs is less than 11 amino acid modifications, with any combination of CDRs being changed (e.g., there may be one change in vlCDR1, two in vhCDR2, none in vhCDR3, etc.). In some embodiments, a binding domain comprises a set of 6 CDRs that are at least 90, 95, 97, 98 or 99% identical to the 6 CDRs of any of the above binding domains. In some embodiments, the VH1 comprises the amino acid sequence of SEQ ID NO: 2241, (ii) the VL1 comprises the amino acid sequence of SEQ ID NO: 2243, (iii) the VH2 comprises the amino acid sequence of SEQ ID NO: 2233, and (iv) the VL2 comprises the amino acid sequence of SEQ ID NO: 2234. In some such antibodies, the variable heavy domain or the variable light domain can comprise variants of any of the above in which an N-terminal glutamine or glutamate is replaced with pyroglutamate. In some embodiments, a binding domain comprises a variant VH domain and/or variant VL domain having 1, 2, 3, 4, 5, 6, 7, 8, 9 or 10 amino acid changes from any of the above VH and VL domains. In some embodiments, a binding domain comprises a variant VH domain and/or variant VL domain at least 90%, 95%, 97%, 98%, or 99% identical to any of the above VH and VL domains. In some embodiments, the variant VH domain and/or VL domain has amino acid changes in a framework region (e.g., FR1, FR2, FR3, or FR4) but not in a CDR. In some embodiments, the changes are amino acid substitutions at one, two, three, or more of the following residues: (a) rare framework residues that differ between the murine antibody framework (i.e., donor antibody framework) and the human antibody framework (i.e., acceptor antibody framework); (b) Vernier zone residues when differing between donor antibody framework and acceptor antibody framework; (c) interchain packing residues at the VH/VL interface that differ between the donor antibody framework and the acceptor antibody framework; (d) canonical residues which differ between the donor antibody framework and the acceptor antibody framework sequences, particularly the framework regions crucial for the definition of the canonical class of the murine antibody CDR loops; (e) residues that are adjacent to a CDR; (g) residues capable of interacting with the antigen; (h) residues capable of interacting with the CDR; and (i) contact residues between the VH domain and the VL domain. In some embodiments, the substitutions are residues that are adjacent to a CDR, residues capable of interacting with the antigen, or residues capable of interacting with the CDR. Regarding the TL1A binding domain, in some embodiments, the VH sequence includes 53Y (i.e., a Y at position 53) and/or 100V (i.e., a V at position 100) as numbered by Kabat. In some embodiments, the VH sequence includes 53Y and 100V. In some embodiments, the VL sequence includes 120Q (i.e., a Q at position 120) as numbered by Kabat. In certain embodiments, the TL1A binding domain is capable of binding to TL1A, as measured at least one of a Biacore, surface plasmon resonance (SPR) and/or BLI (biolayer interferometry, e.g., Octet assay) assay, with the latter finding particular use in many embodiments. In particular embodiments, the TL1a ABD is capable of binding human TL1A antigen (see SEQ ID NO: 4). Regarding the IL23 binding domain, in some embodiments, the VL sequence includes 66V (i.e., a V at position 66) and/or 105Y (i.e., a Y at position 105) as numbered by Kabat. In some embodiments, the VL sequence includes 66V and 105Y In certain embodiments, the IL23 binding domain is capable of binding to IL23, as measured at least one of a Biacore, surface plasmon resonance (SPR) and/or BLI (biolayer interferometry, e.g., Octet assay) assay, with the latter finding particular use in many embodiments. In particular embodiments, the IL23 binding domain is capable of binding human IL23p19 antigen (see SEQ ID NO: 1).

[0324] In some embodiments, the VH1 comprises a vhCDR1, a vhCDR2, and a vhCDR3 contained within a variable heavy domain comprising the amino acid sequence of SEQ ID NO: 2241, (ii) the VL1 comprises a vlCDR1, a vlCDR2, and a vlCDR3 contained within a variable light domain comprising the amino acid sequence of SEQ ID NO: 2243, (iii) the VH2 comprises a vhCDR1, a vhCDR2, and a vhCDR3 contained within a variable heavy domain comprising the amino acid sequence of SEQ ID NO: 2235, and (iv) the VL2 comprises a vlCDR1, a vlCDR2, and a vlCDR3 contained within a variable light domain comprising the amino acid sequence of SEQ ID NO: 2237. In some embodiments, the CDRs are as defined by Kabat. In other embodiments, the CDRs are as defined by Chothia, Kabat+Chothia, AbM, contact, or IMGT. In some embodiments, the VH1 comprises a vhCDR1 comprising the amino acid sequence of SEQ ID NO: 102, a vhCDR2 comprising the amino acid sequence of SEQ ID NO: 1924, and a vhCDR3 comprising the amino acid sequence of SEQ ID NO: 1203, (ii) the VL1 comprises a vlCDR1 comprising the amino acid sequence of SEQ ID NO: 106, a vlCDR2 comprising the amino acid sequence of SEQ ID NO: 107, and a vlCDR3 comprising the amino acid sequence of SEQ ID NO: 108, (iii) the VH2 comprises a vhCDR1 comprising the amino acid sequence of SEQ ID NO: 180, a vhCDR2 comprising the amino acid sequence of SEQ ID NO: 181, and a vhCDR3 comprising the amino acid sequence of SEQ ID NO: 2236, and (iv) the VL2 comprises a vlCDR1 comprising the amino acid sequence of SEQ ID NO: 184, a vlCDR2 comprising the amino acid sequence of SEQ ID NO: 2238, and a vlCDR3 comprising the amino acid sequence of SEQ ID NO: 1250. In some embodiments, a binding domain comprises a set of 6 CDRs with 1, 2, 3, 4, 5, 6, 7, 8, 9, 10 amino acid modifications as compared to the 6 CDRs of any of the above binding domains. That is, the CDRs can be modified as long as the total number of changes in the set of 6 CDRs is less than 11 amino acid modifications, with any combination of CDRs being changed (e.g., there may be one change in vlCDR1, two in vhCDR2, none in vhCDR3, etc.). In some embodiments, a binding domain comprises a set of 6 CDRs that are at least 90, 95, 97, 98 or 99% identical to the 6 CDRs of any of the above binding domains. In some embodiments, the VH1 comprises the amino acid sequence of SEQ ID NO: 2241, (ii) the VL1 comprises the amino acid sequence of SEQ ID NO: 2243, (iii) the VH2 comprises the amino acid sequence of SEQ ID NO: 2235, and (iv) the VL2 comprises the amino acid sequence of SEQ ID NO: 2237. In some such antibodies, the variable heavy domain or the variable light domain can comprise variants of any of the above in which an N-terminal glutamine or glutamate is replaced with pyroglutamate. In some embodiments, a binding domain comprises a variant VH domain and/or variant VL domain having 1, 2, 3, 4, 5, 6, 7, 8, 9 or 10 amino acid changes from any of the above VH and VL domains. In some embodiments, a binding domain comprises a variant VH domain and/or variant VL domain at least 90%, 95%, 97%, 98%, or 99% identical to any of the above VH and VL domains. In some embodiments, the variant VH domain and/or VL domain has amino acid changes in a framework region (e.g., FR1, FR2, FR3, or FR4) but not in a CDR. In some embodiments, the changes are amino acid substitutions at one, two, three, or more of the following residues: (a) rare framework residues that differ between the murine antibody framework (i.e., donor antibody framework) and the human antibody framework (i.e., acceptor antibody framework); (b) Vernier zone residues when differing between donor antibody framework and acceptor antibody framework; (c) interchain packing residues at the VH/VL interface that differ between the donor antibody framework and the acceptor antibody framework; (d) canonical residues which differ between the donor antibody framework and the acceptor antibody framework sequences, particularly the framework regions crucial for the definition of the canonical class of the murine antibody CDR loops; (e) residues that are adjacent to a CDR; (g) residues capable of interacting with the antigen; (h) residues capable of interacting with the CDR; and (i) contact residues between the VH domain and the VL domain. In some embodiments, the substitutions are residues that are adjacent to a CDR, residues capable of interacting with the antigen, or residues capable of interacting with the CDR. Regarding the TL1A binding domain, in some embodiments, the VH sequence includes 53Y (i.e., a Y at position 53) and/or 100V (i.e., a V at position 100) as numbered by Kabat. In some embodiments, the VH sequence includes 53Y and 100V. In some embodiments, the VL sequence includes 120Q (i.e., a Q at position 120) as numbered by Kabat. In certain embodiments, the TL1A binding domain is capable of binding to TL1A, as measured at least one of a Biacore, surface plasmon resonance (SPR) and/or BLI (biolayer interferometry, e.g., Octet assay) assay, with the latter finding particular use in many embodiments. In particular embodiments, the TL1a ABD is capable of binding human TL1A antigen (see SEQ ID NO: 4). Regarding the TL23 binding domain, in some embodiments, the VL sequence includes 66V (i.e., a V at position 66) and/or 105Y (i.e., a Y at position 105) as numbered by Kabat. In some embodiments, the VL sequence includes 66V and 105Y In certain embodiments, the IL23 binding domain is capable of binding to IL23, as measured at least one of a Biacore, surface plasmon resonance (SPR) and/or BLI (biolayer interferometry, e.g., Octet assay) assay, with the latter finding particular use in many embodiments. In particular embodiments, the IL23 binding domain is capable of binding human IL23p19 antigen (see SEQ ID NO: 1).

[0325] In some embodiments, the VH1 comprises a vhCDR1, a vhCDR2, and a vhCDR3 contained within a variable heavy domain comprising the amino acid sequence of SEQ ID NO: 2253, (ii) the VL1 comprises a vlCDR1, a vlCDR2, and a vlCDR3 contained within a variable light domain comprising the amino acid sequence of SEQ ID NO: 2243, (iii) the VH2 comprises a vhCDR1, a vhCDR2, and a vhCDR3 contained within a variable heavy domain comprising the amino acid sequence of SEQ ID NO: 2233, and (iv) the VL2 comprises a vlCDR1, a vlCDR2, and a vlCDR3 contained within a variable light domain comprising the amino acid sequence of SEQ ID NO: 2234. In some embodiments, the CDRs are as defined by Kabat. In other embodiments, the CDRs are as defined by Chothia, Kabat+Chothia, AbM, contact, or IMGT. In some embodiments, the VH1 comprises a vhCDR1 comprising the amino acid sequence of SEQ ID NO: 1201, a vhCDR2 comprising the amino acid sequence of SEQ ID NO: 1202, and a vhCDR3 comprising the amino acid sequence of SEQ ID NO: 1203, (ii) the VL1 comprises a vlCDR1 comprising the amino acid sequence of SEQ ID NO: 106, a vlCDR2 comprising the amino acid sequence of SEQ ID NO: 107, and a vlCDR3 comprising the amino acid sequence of SEQ ID NO: 108, (iii) the VH2 comprises a vhCDR1 comprising the amino acid sequence of SEQ ID NO: 180, a vhCDR2 comprising the amino acid sequence of SEQ ID NO: 181, and a vhCDR3 comprising the amino acid sequence of SEQ ID NO: 182, and (iv) the VL2 comprises a vlCDR1 comprising the amino acid sequence of SEQ ID NO: 184, a vlCDR2 comprising the amino acid sequence of SEQ ID NO: 1249, and a vlCDR3 comprising the amino acid sequence of SEQ ID NO: 1250. In some embodiments, a binding domain comprises a set of 6 CDRs with 1, 2, 3, 4, 5, 6, 7, 8, 9, 10 amino acid modifications as compared to the 6 CDRs of any of the above binding domains. That is, the CDRs can be modified as long as the total number of changes in the set of 6 CDRs is less than 11 amino acid modifications, with any combination of CDRs being changed (e.g., there may be one change in vlCDR1, two in vhCDR2, none in vhCDR3, etc.). In some embodiments, a binding domain comprises a set of 6 CDRs that are at least 90, 95, 97, 98 or 99% identical to the 6 CDRs of any of the above binding domains. In some embodiments, the VH1 comprises the amino acid sequence of SEQ ID NO: 2253, (ii) the VL1 comprises the amino acid sequence of SEQ ID NO: 2243, (iii) the VH2 comprises the amino acid sequence of SEQ ID NO: 2233, and (iv) the VL2 comprises the amino acid sequence of SEQ ID NO: 2234. In some such antibodies, the variable heavy domain or the variable light domain can comprise variants of any of the above in which an N-terminal glutamine or glutamate is replaced with pyroglutamate. In some embodiments, a binding domain comprises a variant VH domain and/or variant VL domain having 1, 2, 3, 4, 5, 6, 7, 8, 9 or 10 amino acid changes from any of the above VH and VL domains. In some embodiments, a binding domain comprises a variant VH domain and/or variant VL domain at least 90%, 95%, 97%, 98%, or 99% identical to any of the above VH and VL domains. In some embodiments, the variant VH domain and/or VL domain has amino acid changes in a framework region (e.g., FR1, FR2, FR3, or FR4) but not in a CDR. In some embodiments, the changes are amino acid substitutions at one, two, three, or more of the following residues: (a) rare framework residues that differ between the murine antibody framework (i.e., donor antibody framework) and the human antibody framework (i.e., acceptor antibody framework); (b) Vernier zone residues when differing between donor antibody framework and acceptor antibody framework; (c) interchain packing residues at the VH/VL interface that differ between the donor antibody framework and the acceptor antibody framework; (d) canonical residues which differ between the donor antibody framework and the acceptor antibody framework sequences, particularly the framework regions crucial for the definition of the canonical class of the murine antibody CDR loops; (e) residues that are adjacent to a CDR; (g) residues capable of interacting with the antigen; (h) residues capable of interacting with the CDR; and (i) contact residues between the VH domain and the VL domain. In some embodiments, the substitutions are residues that are adjacent to a CDR, residues capable of interacting with the antigen, or residues capable of interacting with the CDR. Regarding the TL1A binding domain, in some embodiments, the VH sequence includes 53Y (i.e., a Y at position 53) and/or 100V (i.e., a V at position 100) as numbered by Kabat. In some embodiments, the VH sequence includes 53Y and 100V. In some embodiments, the VL sequence includes 120Q (i.e., a Q at position 120) as numbered by Kabat. In certain embodiments, the TL1A binding domain is capable of binding to TL1A, as measured at least one of a Biacore, surface plasmon resonance (SPR) and/or BLI (biolayer interferometry, e.g., Octet assay) assay, with the latter finding particular use in many embodiments. In particular embodiments, the TL1a ABD is capable of binding human TL1A antigen (see SEQ ID NO: 4). Regarding the TL23 binding domain, in some embodiments, the VL sequence includes 66V (i.e., a V at position 66) and/or 105Y (i.e., a Y at position 105) as numbered by Kabat. In some embodiments, the VL sequence includes 66V and 105Y In certain embodiments, the IL23 binding domain is capable of binding to IL23, as measured at least one of a Biacore, surface plasmon resonance (SPR) and/or BLI (biolayer interferometry, e.g., Octet assay) assay, with the latter finding particular use in many embodiments. In particular embodiments, the IL23 binding domain is capable of binding human IL23p19 antigen (see SEQ ID NO: 1).

[0326] In some embodiments, the VH1 comprises a vhCDR1, a vhCDR2, and a vhCDR3 contained within a variable heavy domain comprising the amino acid sequence of SEQ ID NO: 2259, (ii) the VL1 comprises a vlCDR1, a vlCDR2, and a vlCDR3 contained within a variable light domain comprising the amino acid sequence of SEQ ID NO: 2243, (iii) the VH2 comprises a vhCDR1, a vhCDR2, and a vhCDR3 contained within a variable heavy domain comprising the amino acid sequence of SEQ ID NO: 2233, and (iv) the VL2 comprises a vlCDR1, a vlCDR2, and a vlCDR3 contained within a variable light domain comprising the amino acid sequence of SEQ ID NO: 2234. In some embodiments, the CDRs are as defined by Kabat. In other embodiments, the CDRs are as defined by Chothia, Kabat+Chothia, AbM, contact, or IMGT. In some embodiments, the VH1 comprises a vhCDR1 comprising the amino acid sequence of SEQ ID NO: 102, a vhCDR2 comprising the amino acid sequence of SEQ ID NO: 1924, and a vhCDR3 comprising the amino acid sequence of SEQ ID NO: 104, (ii) the VL1 comprises a vlCDR1 comprising the amino acid sequence of SEQ ID NO: 106, a vlCDR2 comprising the amino acid sequence of SEQ ID NO: 107, and a vlCDR3 comprising the amino acid sequence of SEQ ID NO: 108, (iii) the VH2 comprises a vhCDR1 comprising the amino acid sequence of SEQ ID NO: 180, a vhCDR2 comprising the amino acid sequence of SEQ ID NO: 181, and a vhCDR3 comprising the amino acid sequence of SEQ ID NO: 182, and (iv) the VL2 comprises a vlCDR1 comprising the amino acid sequence of SEQ ID NO: 184, a vlCDR2 comprising the amino acid sequence of SEQ ID NO: 1249, and a vlCDR3 comprising the amino acid sequence of SEQ ID NO: 1250. In some embodiments, a binding domain comprises a set of 6 CDRs with 1, 2, 3, 4, 5, 6, 7, 8, 9, 10 amino acid modifications as compared to the 6 CDRs of any of the above binding domains. That is, the CDRs can be modified as long as the total number of changes in the set of 6 CDRs is less than 11 amino acid modifications, with any combination of CDRs being changed (e.g., there may be one change in vlCDR1, two in vhCDR2, none in vhCDR3, etc.). In some embodiments, a binding domain comprises a set of 6 CDRs that are at least 90, 95, 97, 98 or 99% identical to the 6 CDRs of any of the above binding domains. In some embodiments, the VH1 comprises the amino acid sequence of SEQ ID NO: 2259, (ii) the VL1 comprises the amino acid sequence of SEQ ID NO: 2243, (iii) the VH2 comprises the amino acid sequence of SEQ ID NO: 2233, and (iv) the VL2 comprises the amino acid sequence of SEQ ID NO: 2234. In some such antibodies, the variable heavy domain or the variable light domain can comprise variants of any of the above in which an N-terminal glutamine or glutamate is replaced with pyroglutamate. In some embodiments, a binding domain comprises a variant VH domain and/or variant VL domain having 1, 2, 3, 4, 5, 6, 7, 8, 9 or 10 amino acid changes from any of the above VH and VL domains. In some embodiments, a binding domain comprises a variant VH domain and/or variant VL domain at least 90%, 95%, 97%, 98%, or 99% identical to any of the above VH and VL domains. In some embodiments, the variant VH domain and/or VL domain has amino acid changes in a framework region (e.g., FR1, FR2, FR3, or FR4) but not in a CDR. In some embodiments, the changes are amino acid substitutions at one, two, three, or more of the following residues: (a) rare framework residues that differ between the murine antibody framework (i.e., donor antibody framework) and the human antibody framework (i.e., acceptor antibody framework); (b) Vernier zone residues when differing between donor antibody framework and acceptor antibody framework; (c) interchain packing residues at the VH/VL interface that differ between the donor antibody framework and the acceptor antibody framework; (d) canonical residues which differ between the donor antibody framework and the acceptor antibody framework sequences, particularly the framework regions crucial for the definition of the canonical class of the murine antibody CDR loops; (e) residues that are adjacent to a CDR; (g) residues capable of interacting with the antigen; (h) residues capable of interacting with the CDR; and (i) contact residues between the VH domain and the VL domain. In some embodiments, the substitutions are residues that are adjacent to a CDR, residues capable of interacting with the antigen, or residues capable of interacting with the CDR. Regarding the TL1A binding domain, in some embodiments, the VH sequence includes 53Y (i.e., a Y at position 53) and/or 100V (i.e., a V at position 100) as numbered by Kabat. In some embodiments, the VH sequence includes 53Y and 100V. In some embodiments, the VL sequence includes 120Q (i.e., a Q at position 120) as numbered by Kabat. In certain embodiments, the TL1A binding domain is capable of binding to TL1A, as measured at least one of a Biacore, surface plasmon resonance (SPR) and/or BLI (biolayer interferometry, e.g., Octet assay) assay, with the latter finding particular use in many embodiments. In particular embodiments, the TL1a ABD is capable of binding human TL1A antigen (see SEQ ID NO: 4). Regarding the TL23 binding domain, in some embodiments, the VL sequence includes 66V (i.e., a V at position 66) and/or 105Y (i.e., a Y at position 105) as numbered by Kabat. In some embodiments, the VL sequence includes 66V and 105Y In certain embodiments, the IL23 binding domain is capable of binding to IL23, as measured at least one of a Biacore, surface plasmon resonance (SPR) and/or BLI (biolayer interferometry, e.g., Octet assay) assay, with the latter finding particular use in many embodiments. In particular embodiments, the IL23 binding domain is capable of binding human IL23p19 antigen (see SEQ ID NO: 1).

[0327] In some embodiments, the VH1 comprises a vhCDR1, a vhCDR2, and a vhCDR3 contained within a variable heavy domain comprising the amino acid sequence of SEQ ID NO: 1674, (ii) the VL1 comprises a vlCDR1, a vlCDR2, and a vlCDR3 contained within a variable light domain comprising the amino acid sequence of SEQ ID NO: 1204, (iii) the VH2 comprises a vhCDR1, a vhCDR2, and a vhCDR3 contained within a variable heavy domain comprising the amino acid sequence of SEQ ID NO: 179, and (iv) the VL2 comprises a vlCDR1, a vlCDR2, and a vlCDR3 contained within a variable light domain comprising the amino acid sequence of SEQ ID NO: 1248. In some embodiments, the CDRs are as defined by Kabat. In other embodiments, the CDRs are as defined by Chothia, Kabat+Chothia, AbM, contact, or IMGT. In some embodiments, the VH1 comprises a vhCDR1 comprising the amino acid sequence of SEQ ID NO: 102, a vhCDR2 comprising the amino acid sequence of SEQ ID NO: 1924, and a vhCDR3 comprising the amino acid sequence of SEQ ID NO: 1203, (ii) the VL1 comprises a vlCDR1 comprising the amino acid sequence of SEQ ID NO: 106, a vlCDR2 comprising the amino acid sequence of SEQ ID NO: 107, and a vlCDR3 comprising the amino acid sequence of SEQ ID NO: 108, (iii) the VH2 comprises a vhCDR1 comprising the amino acid sequence of SEQ ID NO: 180, a vhCDR2 comprising the amino acid sequence of SEQ ID NO: 181, and a vhCDR3 comprising the amino acid sequence of SEQ ID NO: 182, and (iv) the VL2 comprises a vlCDR1 comprising the amino acid sequence of SEQ ID NO: 184, a vlCDR2 comprising the amino acid sequence of SEQ ID NO: 1249, and a vlCDR3 comprising the amino acid sequence of SEQ ID NO: 1250. In some embodiments, a binding domain comprises a set of 6 CDRs with 1, 2, 3, 4, 5, 6, 7, 8, 9, 10 amino acid modifications as compared to the 6 CDRs of any of the above binding domains. That is, the CDRs can be modified as long as the total number of changes in the set of 6 CDRs is less than 11 amino acid modifications, with any combination of CDRs being changed (e.g., there may be one change in vlCDR1, two in vhCDR2, none in vhCDR3, etc.). In some embodiments, a binding domain comprises a set of 6 CDRs that are at least 90, 95, 97, 98 or 99% identical to the 6 CDRs of any of the above binding domains. In some embodiments, the VH1 comprises the amino acid sequence of SEQ ID NO: 1674, (ii) the VL1 comprises the amino acid sequence of SEQ ID NO: 1204, (iii) the VH2 comprises the amino acid sequence of SEQ ID NO: 179, and (iv) the VL2 comprises the amino acid sequence of SEQ ID NO: 1248. In some such antibodies, the variable heavy domain or the variable light domain can comprise variants of any of the above in which an N-terminal glutamine or glutamate is replaced with pyroglutamate. In some embodiments, a binding domain comprises a variant VH domain and/or variant VL domain having 1, 2, 3, 4, 5, 6, 7, 8, 9 or 10 amino acid changes from any of the above VH and VL domains. In some embodiments, a binding domain comprises a variant VH domain and/or variant VL domain at least 90%, 95%, 97%, 98%, or 99% identical to any of the above VH and VL domains. In some embodiments, the variant VH domain and/or VL domain has amino acid changes in a framework region (e.g., FR1, FR2, FR3, or FR4) but not in a CDR. In some embodiments, the changes are amino acid substitutions at one, two, three, or more of the following residues: (a) rare framework residues that differ between the murine antibody framework (i.e., donor antibody framework) and the human antibody framework (i.e., acceptor antibody framework); (b) Vernier zone residues when differing between donor antibody framework and acceptor antibody framework; (c) interchain packing residues at the VH/VL interface that differ between the donor antibody framework and the acceptor antibody framework; (d) canonical residues which differ between the donor antibody framework and the acceptor antibody framework sequences, particularly the framework regions crucial for the definition of the canonical class of the murine antibody CDR loops; (e) residues that are adjacent to a CDR; (g) residues capable of interacting with the antigen; (h) residues capable of interacting with the CDR; and (i) contact residues between the VH domain and the VL domain. In some embodiments, the substitutions are residues that are adjacent to a CDR, residues capable of interacting with the antigen, or residues capable of interacting with the CDR. Regarding the TL1A binding domain, in some embodiments, the VH sequence includes 53Y (i.e., a Y at position 53) and/or 100V (i.e., a V at position 100) as numbered by Kabat. In some embodiments, the VH sequence includes 53Y and 100V. In some embodiments, the VL sequence includes 120Q (i.e., a Q at position 120) as numbered by Kabat. In certain embodiments, the TL1A binding domain is capable of binding to TL1A, as measured at least one of a Biacore, surface plasmon resonance (SPR) and/or BLI (biolayer interferometry, e.g., Octet assay) assay, with the latter finding particular use in many embodiments. In particular embodiments, the TL1a ABD is capable of binding human TL1A antigen (see SEQ ID NO: 4). Regarding the TL23 binding domain, in some embodiments, the VL sequence includes 66V (i.e., a V at position 66) and/or 105Y (i.e., a Y at position 105) as numbered by Kabat. In some embodiments, the VL sequence includes 66V and 105Y In certain embodiments, the IL23 binding domain is capable of binding to IL23, as measured at least one of a Biacore, surface plasmon resonance (SPR) and/or BLI (biolayer interferometry, e.g., Octet assay) assay, with the latter finding particular use in many embodiments. In particular embodiments, the IL23 binding domain is capable of binding human IL23p19 antigen (see SEQ ID NO: 1).

[0328] In some embodiments, the VH1 comprises a vhCDR1, a vhCDR2, and a vhCDR3 contained within a variable heavy domain comprising the amino acid sequence of SEQ ID NO: 1200, (ii) the VL1 comprises a vlCDR1, a vlCDR2, and a vlCDR3 contained within a variable light domain comprising the amino acid sequence of SEQ ID NO: 1204, (iii) the VH2 comprises a vhCDR1, a vhCDR2, and a vhCDR3 contained within a variable heavy domain comprising the amino acid sequence of SEQ ID NO: 179, and (iv) the VL2 comprises a vlCDR1, a vlCDR2, and a vlCDR3 contained within a variable light domain comprising the amino acid sequence of SEQ ID NO: 1248. In some embodiments, the CDRs are as defined by Kabat. In other embodiments, the CDRs are as defined by Chothia, Kabat+Chothia, AbM, contact, or IMGT. In some embodiments, the VH1 comprises a vhCDR1 comprising the amino acid sequence of SEQ ID NO: 1201, a vhCDR2 comprising the amino acid sequence of SEQ ID NO: 1202, and a vhCDR3 comprising the amino acid sequence of SEQ ID NO: 1203, (ii) the VL1 comprises a vlCDR1 comprising the amino acid sequence of SEQ ID NO: 106, a vlCDR2 comprising the amino acid sequence of SEQ ID NO: 107, and a vlCDR3 comprising the amino acid sequence of SEQ ID NO: 108, (iii) the VH2 comprises a vhCDR1 comprising the amino acid sequence of SEQ ID NO: 180, a vhCDR2 comprising the amino acid sequence of SEQ ID NO: 181, and a vhCDR3 comprising the amino acid sequence of SEQ ID NO: 182, and (iv) the VL2 comprises a vlCDR1 comprising the amino acid sequence of SEQ ID NO: 184, a vlCDR2 comprising the amino acid sequence of SEQ ID NO: 1249, and a vlCDR3 comprising the amino acid sequence of SEQ ID NO: 1250. In some embodiments, a binding domain comprises a set of 6 CDRs with 1, 2, 3, 4, 5, 6, 7, 8, 9, 10 amino acid modifications as compared to the 6 CDRs of any of the above binding domains. That is, the CDRs can be modified as long as the total number of changes in the set of 6 CDRs is less than 11 amino acid modifications, with any combination of CDRs being changed (e.g., there may be one change in vlCDR1, two in vhCDR2, none in vhCDR3, etc.). In some embodiments, a binding domain comprises a set of 6 CDRs that are at least 90, 95, 97, 98 or 99% identical to the 6 CDRs of any of the above binding domains. In some embodiments, the VH1 comprises the amino acid sequence SEQ ID NO: 1200, (ii) the VL1 comprises the amino acid sequence of SEQ ID NO: 1204, (iii) the VH2 comprises the amino acid sequence of SEQ ID NO: 179, and (iv) the VL2 comprises the amino acid sequence of SEQ ID NO: 1248. In some such antibodies, the variable heavy domain or the variable light domain can comprise variants of any of the above in which an N-terminal glutamine or glutamate is replaced with pyroglutamate. In some embodiments, a binding domain comprises a variant VH domain and/or variant VL domain having 1, 2, 3, 4, 5, 6, 7, 8, 9 or 10 amino acid changes from any of the above VH and VL domains. In some embodiments, a binding domain comprises a variant VH domain and/or variant VL domain at least 90%, 95%, 97%, 98%, or 99% identical to any of the above VH and VL domains. In some embodiments, the variant VH domain and/or VL domain has amino acid changes in a framework region (e.g., FR1, FR2, FR3, or FR4) but not in a CDR. In some embodiments, the changes are amino acid substitutions at one, two, three, or more of the following residues: (a) rare framework residues that differ between the murine antibody framework (i.e., donor antibody framework) and the human antibody framework (i.e., acceptor antibody framework); (b) Vernier zone residues when differing between donor antibody framework and acceptor antibody framework; (c) interchain packing residues at the VH/VL interface that differ between the donor antibody framework and the acceptor antibody framework; (d) canonical residues which differ between the donor antibody framework and the acceptor antibody framework sequences, particularly the framework regions crucial for the definition of the canonical class of the murine antibody CDR loops; (e) residues that are adjacent to a CDR; (g) residues capable of interacting with the antigen; (h) residues capable of interacting with the CDR; and (i) contact residues between the VH domain and the VL domain. In some embodiments, the substitutions are residues that are adjacent to a CDR, residues capable of interacting with the antigen, or residues capable of interacting with the CDR. Regarding the TL1A binding domain, in some embodiments, the VH sequence includes 53Y (i.e., a Y at position 53) and/or 100V (i.e., a V at position 100) as numbered by Kabat. In some embodiments, the VH sequence includes 53Y and 100V. In some embodiments, the VL sequence includes 120Q (i.e., a Q at position 120) as numbered by Kabat. In certain embodiments, the TL1A binding domain is capable of binding to TL1A, as measured at least one of a Biacore, surface plasmon resonance (SPR) and/or BLI (biolayer interferometry, e.g., Octet assay) assay, with the latter finding particular use in many embodiments. In particular embodiments, the TL1a ABD is capable of binding human TL1A antigen (see SEQ ID NO: 4). Regarding the TL23 binding domain, in some embodiments, the VL sequence includes 66V (i.e., a V at position 66) and/or 105Y (i.e., a Y at position 105) as numbered by Kabat. In some embodiments, the VL sequence includes 66V and 105Y In certain embodiments, the IL23 binding domain is capable of binding to IL23, as measured at least one of a Biacore, surface plasmon resonance (SPR) and/or BLI (biolayer interferometry, e.g., Octet assay) assay, with the latter finding particular use in many embodiments. In particular embodiments, the IL23 binding domain is capable of binding human IL23p19 antigen (see SEQ ID NO: 1).

[0329] In some embodiments, an anti-TL1A×anti-TL23 antibody comprises a first heavy chain, a first light chain, a second heavy chain, and a second light chain. In some embodiments, the two heavy chains and the two light chains comprise the sets of heavy and light chains in XENP53412, XENP53413, XENP53369, XENP53375, XENP53387, XENP53415, XENP53370, XENP53371, XENP53376, XENP53377, XENP53378, XENP53379, XENP53380, or XENP53414. In some embodiments, an anti-TL1A×anti-IL23 antibody comprises: (1) an anti-TL1A heavy chain and light chain pair from XENP53412, XENP53413, XENP53369, XENP53375, XENP53370, XENP53371, XENP53376, XENP53377, XENP53378, XENP53379, XENP53380, or XENP53414, or heavy chain variants thereof in which the N-terminal glutamine is replaced with pyroglutamate and/or the C-terminal lysine or the C-terminal lysine and glycine are removed, or comprises an anti-TL1A heavy chain and light chain pair from XENP53415 or XENP53387 or heavy chain variants thereof in which the C-terminal lysine or the C-terminal lysine and glycine are removed and/or light chain variants thereof in which the N-terminal glutamine is replaced with pyroglutamate; and (2) an anti-IL23 heavy chain and light chain pair from XENP53412, XENP53413, XENP53369, XENP53375, XENP53387, XENP53415, XENP53370, XENP53371, XENP53376, XENP53377, XENP53378, XENP53379, XENP53380, or XENP53414, or heavy chain variants thereof in which the N-terminal glutamine is replaced with pyroglutamate and/or the C-terminal lysine or the C-terminal lysine and glycine are removed. In some embodiments, the first heavy chain comprises the amino acid sequence of SEQ ID NO: 2240 or a variant thereof in which the N-terminal glutamine is replaced with pyroglutamate and/or the C-terminal lysine or the C-terminal lysine and glycine are removed, the first light chain comprises the amino acid sequence of SEQ ID NO: 2242, the second heavy chain comprises the amino acid sequence of SEQ ID NO: 2244 or a variant thereof in which the N-terminal glutamine is replaced with pyroglutamate and/or the C-terminal lysine or the C-terminal lysine and glycine are removed, and the second light chain comprises the amino acid sequence of SEQ ID NO: 2245. In some embodiments, the first heavy chain comprises the amino acid sequence of SEQ ID NO: 2240 or a variant thereof in which the N-terminal glutamine is replaced with pyroglutamate and/or the C-terminal lysine or the C-terminal lysine and glycine are removed, the first light chain comprises the amino acid sequence of SEQ ID NO: 2242, the second heavy chain comprises the amino acid sequence of SEQ ID NO: 2250 or a variant thereof in which the N-terminal glutamine is replaced with pyroglutamate and/or the C-terminal lysine or the C-terminal lysine and glycine are removed, and the second light chain comprises the amino acid sequence of SEQ ID NO: 2251. In some embodiments, the first heavy chain comprises the amino acid sequence of SEQ ID NO: 2252 or a variant thereof in which the N-terminal glutamine is replaced with pyroglutamate and/or the C-terminal lysine or the C-terminal lysine and glycine are removed, the first light chain comprises the amino acid sequence of SEQ ID NO: 2242, the second heavy chain comprises the amino acid sequence of SEQ ID NO: 2244 or a variant thereof in which the N-terminal glutamine is replaced with pyroglutamate and/or the C-terminal lysine or the C-terminal lysine and glycine are removed, and the second light chain comprises the amino acid sequence of SEQ ID NO: 2245. In some embodiments, the first heavy chain comprises the amino acid sequence of SEQ ID NO: 2258 or a variant thereof in which the N-terminal glutamine is replaced with pyroglutamate and/or the C-terminal lysine or the C-terminal lysine and glycine are removed, the first light chain comprises the amino acid sequence of SEQ ID NO: 2242, the second heavy chain comprises the amino acid sequence of SEQ ID NO: 2244 or a variant thereof in which the N-terminal glutamine is replaced with pyroglutamate and/or the C-terminal lysine or the C-terminal lysine and glycine are removed, and the second light chain comprises the amino acid sequence of SEQ ID NO: 2245. In some embodiments, the first heavy chain comprises the amino acid sequence of SEQ ID NO: 2264 or a variant thereof in which the C-terminal lysine or the C-terminal lysine and glycine are removed, the first light chain comprises the amino acid sequence of SEQ ID NO: 2265 or a variant thereof in which the N-terminal glutamine is replaced with pyroglutamate, the second heavy chain comprises the amino acid sequence of SEQ ID NO: 2266 or a variant thereof in which the N-terminal glutamine is replaced with pyroglutamate and/or the C-terminal lysine or the C-terminal lysine and glycine are removed, and the second light chain comprises the amino acid sequence of SEQ ID NO: 2267. In some embodiments, the first heavy chain comprises the amino acid sequence of SEQ ID NO: 2264 or a variant thereof in which the C-terminal lysine or the C-terminal lysine and glycine are removed, the first light chain comprises the amino acid sequence of SEQ ID NO: 2269 or a variant thereof in which the N-terminal glutamine is replaced with pyroglutamate, the second heavy chain comprises the amino acid sequence of SEQ ID NO: 2266 or a variant thereof in which the N-terminal glutamine is replaced with pyroglutamate and/or the C-terminal lysine or the C-terminal lysine and glycine are removed, and the second light chain comprises the amino acid sequence of SEQ ID NO: 2267. In some embodiments, an anti-TL1A×anti-IL23 antibody comprises a heavy chain and/or a light chain having 1, 2, 3, 4, 5, 6, 7, 8, 9 or 10 amino acid changes from any of the above heavy chains and light chains. In some embodiments, an anti-TL1A×anti-IL23 antibody comprises a heavy chain and/or a light chain at least 90%, 95%, 97%, 98%, or 99% identical to any of the above heavy chains and light chains. In some embodiments, the amino acid changes are in a constant region but not in a variable region. In some embodiments, the amino acid changes are in a constant region or in a framework region (e.g., FR1, FR2, FR3, or FR4) but not in a CDR. In some embodiments, the changes are amino acid substitutions at one, two, three, or more of the following residues: (a) rare framework residues that differ between the murine antibody framework (i.e., donor antibody framework) and the human antibody framework (i.e., acceptor antibody framework); (b) Vernier zone residues when differing between donor antibody framework and acceptor antibody framework; (c) interchain packing residues at the VH/VL interface that differ between the donor antibody framework and the acceptor antibody framework; (d) canonical residues which differ between the donor antibody framework and the acceptor antibody framework sequences, particularly the framework regions crucial for the definition of the canonical class of the murine antibody CDR loops; (e) residues that are adjacent to a CDR; (g) residues capable of interacting with the antigen; (h) residues capable of interacting with the CDR; and (i) contact residues between the VH domain and the VL domain. In some embodiments, the substitutions are residues that are adjacent to a CDR, residues capable of interacting with the antigen, or residues capable of interacting with the CDR. Regarding the TL1A binding domain, in some embodiments, the VH sequence includes 53Y (i.e., a Y at position 53) and/or 100V (i.e., a V at position 100) as numbered by Kabat. In some embodiments, the VH sequence includes 53Y and 100V. In some embodiments, the VL sequence includes 120Q (i.e., a Q at position 120) as numbered by Kabat. Regarding the IL23 binding domain, in some embodiments, the VL sequence includes 66V (i.e., a V at position 66) and/or 105Y (i.e., a Y at position 105) as numbered by Kabat. In some embodiments, the VL sequence includes 66V and 105Y Regarding the TL1A binding domain, in certain embodiments, the TL1A binding domain is capable of binding to TL1A, as measured at least one of a Biacore, surface plasmon resonance (SPR) and/or BLI (biolayer interferometry, e.g., Octet assay) assay, with the latter finding particular use in many embodiments. In particular embodiments, the TL1a ABD is capable of binding human TL1A antigen (see SEQ ID NO: 4). Regarding the TL23 binding domain, in certain embodiments, the IL23 binding domain is capable of binding to IL23, as measured at least one of a Biacore, surface plasmon resonance (SPR) and/or BLI (biolayer interferometry, e.g., Octet assay) assay, with the latter finding particular use in many embodiments. In particular embodiments, the TL23 binding domain is capable of binding human IL23p19 antigen (see SEQ ID NO: 1).

[0330] An ongoing problem in antibody technologies is the desire for “bispecific” antibodies that bind to two different antigens simultaneously, in general thus allowing the different antigens to be brought into proximity and resulting in new functionalities and new therapies. In general, these antibodies are made by including genes for each heavy and light chain into the host cells. This generally results in the formation of the desired heterodimer (A-B), as well as the two homodimers (A-A and B-B (not including the light chain heterodimeric issues)). However, a major obstacle in the formation of bispecific antibodies is the difficulty in biasing the formation of the desired heterodimeric antibody over the formation of the homodimers and/or purifying the heterodimeric antibody away from the homodimers.

[0331] There are a number of mechanisms that can be used to generate the subject heterodimeric antibodies. In addition, these different mechanisms can be combined to ensure high heterodimerization. Amino acid modifications that facilitate the production and purification of heterodimers are collectively referred to generally as “heterodimerization variants.” As discussed below, heterodimerization variants include “skew” variants (e.g., the “knobs and holes” and the “charge pairs” variants described below) as well as “pI variants,” which allow purification of heterodimers from homodimers. As is generally described in U.S. Pat. No. 9,605,084, hereby incorporated by reference in its entirety and specifically as below for the discussion of heterodimerization variants, useful mechanisms for heterodimerization include “knobs and holes” (“KIH”) as described in U.S. Pat. No. 9,605,084, “electrostatic steering” or “charge pairs” as described in U.S. Pat. No. 9,605,084, pI variants as described in U.S. Pat. No. 9,605,084, and general additional Fc variants as outlined in U.S. Pat. No. 9,605,084 and below.

[0332] Heterodimerization variants that are useful for the formation and purification of the subject heterodimeric antibody (e.g., bispecific antibodies) are further discussed in detailed below.

### 1. Skew Variants

[0333] In some embodiments, the heterodimeric antibody includes skew variants which are one or more amino acid modifications in a first heavy chain (A) and first light chain (a) and/or a second heavy chain (B) and second light chain (b) that favor correct heavy chain-light chain pairing (A-a and B-b). In some embodiments, the heterodimeric antibody includes skew variants which are one or more amino acid modifications in a first heavy chain constant domain (A) (e.g., CH1) and first light chain constant domain (a) and/or a second heavy chain constant domain (B) and second light chain constant domain (b) that favor correct heavy chain-light chain pairing (A-a and B-b). In some embodiments, the heterodimeric antibody includes skew variants which are one or more amino acid modifications in a first variable heavy domain (A) and first variable light domain (a) and/or a second variable heavy domain (B) and second variable light domain (b) that favor correct heavy chain-light chain pairing (A-a and B-b). In some embodiments, the heterodimeric antibody includes skew variants which are one or more amino acid modifications in a first Fc domain (A) and/or a second Fc domain (B) that favor the formation of Fc heterodimers (Fc dimers that include the first and the second Fc domain; (A-B) over Fc homodimers (Fc dimers that include two of the first Fc domain or two of the second Fc domain; A-A or B-B). Suitable skew variants are included in the FIG. 29 of US Publ. App. No. 2016/0355608, hereby incorporated by reference in its entirety and specifically for its disclosure of skew variants, as well as in Tables 12-17 and Table 5. Tables 12-17 depict useful pairs of heterodimerization variant sets (including skew and pI variants). In Table 17, there are variants for which there are no corresponding “monomer 2” variants. Such variants are pI variants that can be used alone on either monomer of a bispecific antibody (e.g., anti-TL1A×anti-IL23 bsAb), or included, for example, on the non-scFv side of a format that utilizes an scFv as a component and an appropriate charged scFv linker can be used on the second monomer that utilizes an scFv as the TL1A binding domain. Suitable charged linkers are shown in Table 4. Heterodimer yield (%) and CH3 Tm (° C.) of preferred Fc heterodimerization variants were previously described (see, e.g., FIG. 8 of U.S. Patent Application No. 2019/0248898).

TABLE 12

| Monomer 1 | Monomer 2 |
|---|---|
| F405A | T394F |
| S364D | Y349K |
| S364E | L368K |
| S364E | Y349K |
| S364F | K370G |
| S364H | Y349K |
| S364H | Y349T |
| S364Y | K370G |
| T411K | K370E |
| V397S/F405A | T394F |
| K370R/T411K | K370E/T411E |
| L351E/S364D | Y349K/L351K |
| L351E/S364E | Y349K/L351K |
| L351E/T366D | L351K/T366K |
| P395T/V397S/F405A | T394F |
| S364D/K370G | S364Y/K370R |
| S364D/T394F | Y349K/F405A |
| S364E/F405A | Y349K/T394F |
| S364E/F405S | Y349K/T394Y |
| S364E/T411E | Y349K/D401K |
| S364H/D401K | Y349T/T411E |
| S364H/F405A | Y349T/T394F |
| S364H/T394F | Y349T/F405A |
| Y349C/S364E | Y349K/S354C |
| L351E/S364D/F405A | Y349K/L351K/T394F |
| L351K/S364H/D401K | Y349T/L351E/T411E |
| S364E/T411E/F405A | Y349K/T394F/D401K |
| S364H/D401K/F405A | Y349T/T394F/T411E |
| S364H/F405A/T411E | Y349T/T394F/D401K |

TABLE 13

| Monomer 1 | Monomer 2 |
|---|---|
| K370E/T411D | T411K |
| L368E/K409E | L368K |
| Y349T/T394F/S354C | S364H/F405A/Y349C |
| T411E | D401K |
| T411E | D401R/T411R |
| Q347E/K360E | Q347R |
| L368E | S364K |
| L368E/K370S | S364K |
| L368E/K370T | S364K |
| L368E/D401R | S364K |
| L368E/D401N | S364K |
| L368E | E357S/S364K |
| L368E | S364K/K409E |
| L368E | S364K/K409V |
| L368D | S364K |
| L368D/K370S | S364K |
| L368D/K370S | S364K/E357L |
| L368D/K370S | S364K/E357Q |
| T411E/K360E/Q362E | D401K |
| K370S | S364K |
| L368E/K370S | S364K/E357Q |
| K370S | S364K/E357Q |
| T411E/K360D | D401K |
| T411E/K360E | D401K |
| T411E/Q362E | D401K |
| T411E/N390D | D401K |
| T411E | D401K/Q347K |
| T411E | D401K/Q347R |
| T411E/K360D/Q362E | D401K |

TABLE 14

| Monomer 1 | Monomer 2 |
|---|---|
| T411E/K360E/N390D | D401K |
| T411E/Q362E/N390D | D401K |
| T411E/Q347R | D401K/K360D |
| T411E/Q347R | D401K/K360E |
| T411E/K360 | D401K/Q347K |
| T411E/K360D | D401K/Q347R |
| T411E/K360E | D401K/Q347K |
| T411E/K360E | D401K/Q347R |
| T411E/S364K | D401K/K370S |
| T411E/K370S | D401K/S364K |
| Q347E | E357Q |
| Q347E | E357Q/Q362K |
| K360D/Q362E | Q347R |
| K360D/Q362E | D401K |
| K360D/Q362E | Q347R/D401K |
| K360E/Q362E | Q347R |
| K360E/Q362E | D401K |
| K360E/Q362E | Q347R/D401K |
| Q362E/N390D | D401K |
| Q347E/K360D | D401N |
| K360D | Q347R/N390K |
| K360D | N390K/D401N |
| K360E | Y349H |
| K370S/Q347E | S364K |
| K370S/E357L | S364K |
| K370S/E357Q | S364K |
| K370S/Q347E/E357L | S364K |
| K370S/Q347E/E357Q | S364K |

TABLE 15

| Monomer 1 | Monomer 2 |
|---|---|
| L368D/K370S/Q347E | S364K |
| L368D/K370S/E357L | S364K |
| L368D/K370S/E357Q | S364K |
| L368D/K370S/Q347E/E357L | S364K |
| L368D/K370S/Q347E/E357Q | S364K |
| L368E/K370S/Q347E | S364K |
| L368E/K370S/E357L | S364K |
| L368E/K370S/E357Q | S364K |
| L368E/K370S/Q347E/E357L | S364K |
| L368E/K370S/Q347E/E357Q | S364K |
| L368D/K370T/Q347E | S364K |
| L368D/K370T/E357L | S364K |
| L368D/K370T/E357Q | S364K |
| L368D/K370T/Q347E/E357L | S364K |
| L368D/K370T/Q347E/E357Q | S364K |
| L368E/K370T/Q347E | S364K |
| L368E/K370T/E357L | S364K |
| L368E/K370T/E357Q | S364K |
| L368E/K370T/Q347E/E357L | S364K |
| L368E/K370T/Q347E/E357Q | S364K |
| T411E/Q362E | D401K/T411K |
| T411E/N390D | D401K/T411K |
| T411E/Q362E | D401R/T411R |
| T411E/N390D | D401R/T411R |
| Y407T | T366Y |
| F405A | T394W |
| T366Y/F405A | T394W/Y407T |
| Y407A | T366W |
| T366S/L368A/Y407V | T366W |
| T366S/L368A/Y407V/Y349C | T366W/S354C |

TABLE 16

| Monomer 1 | Monomer 2 |
|---|---|
| T366S/L368A/Y407V/S354C | T366W/Y349C |
| S354C | Y349C |
| K392D/K409D | E356K/D399K |
| K370D/K392D/K409D | E356K/E357K/D399K |
| K274Q/R355Q/N384S/K392N/V397M/Q419E/ | P217R/P228R/N276K |
| K447_{—} | |
| K274Q/R355Q/N384S/K392N/V397M/Q419E/ | N276K |
| K447_{—} | |
| N384S/K392N/V397M/Q419E | N276K |
| D221E/P228E/L368E | D221R/P228R/K409R |
| C220E/P228E/L368E | C220R/E224R/P228R/ |
| | K409R |
| F405L | K409R |
| T366I/K392M/T394W | F405A/Y407V |
| T366V/K409F | L351Y/Y407A |
| T366A/K392E/K409F/T411E | D399R/S400R/Y407A |
| L351K | L351E |
| K274Q/R355Q/Q419E/K447_{—} | P217R/P228R/N276K |
| K274Q/R355Q/Q419E/K447_{—} | N276K |
| I199T/N203D/K274Q/R355Q/N384S/K392N/ | Q196K/I199T/P217R/ |
| V397M/Q419E/K447_{—} | P228R/N276K |
| I199T/N203D/K274Q/R355Q/N384S/K392N/ | Q196K/I199T/N276K |
| V397M/Q419E/K447_{—} | |
| I199T/N203D/K274Q/R355Q/Q419E/K447_{—} | Q196K/I199T/P217R/ |
| | P228R/N276K |
| I199T/N203D/K274Q/R355Q/Q419E/K447_{—} | Q196K/I199T/N276K |

TABLE 17

| | |
|---|---|
| Monomer 1 | Monomer 2 |

I199T/N203D/K274Q/R355Q/N384S/K392N/V397M/
Q419E/K447_{—}
N208D/Q295E/N384D/Q418E/N421D
N208D/Q295E/Q418E/N421D
Q196K/I199T/P217R/P228R/N276K
Q196K/I199T/N276K
K274Q/R355Q/N384S/K392N/V397M/Q419E/K447_{—}
Q295E/N384D/Q418E/N421D
Q295E/Q418E/N421D
P217R/P228R/N276K
N276K
E269Q/E272Q/E283Q/E357Q
E269Q/E272Q/E283Q
E269Q/E272Q
E269Q/E283Q
E272Q/E283Q
E269Q

[0334] One particular type of skew variants is generally referred to in the art as “knobs and holes,” referring to amino acid engineering that creates steric influences to favor heterodimeric formation and disfavor homodimeric formation, as described in U.S. Ser. No. 61/596,846, Ridgway et al., Protein Engineering 9(7):617 (1996); Atwell et al., J. Mol. Biol. 1997 270:26; U.S. Pat. No. 8,216,805, all of which are hereby incorporated by reference in their entirety and specifically for the disclosure of “knobs and holes” mutations. This is sometimes referred to herein as “steric variants.” The sequences and tables identify a number of “monomer A-monomer B” pairs that rely on “knobs and holes.” In addition, as described in Merchant et al., Nature Biotech. 16:677 (1998), these “knobs and holes” mutations can be combined with disulfide bonds to further favor formation of Fc heterodimers.

[0335] Another method that finds use in the generation of heterodimers is sometimes referred to as “electrostatic steering” as described in Gunasekaran et al., J. Biol. Chem. 285(25):19637 (2010), hereby incorporated by reference in its entirety. This is sometimes referred to herein as “charge pairs.” In this embodiment, electrostatics are used to skew the formation towards heterodimerization. As those in the art will appreciate, these may also have an effect on pI, and thus on purification, and thus could in some cases also be considered pI variants. However, as these were generated to force heterodimerization and were not used as purification tools, they are classified as “skew variants.” These include, but are not limited to, D221E/P228E/L368E paired with D221R/P228R/K409R (e.g., these are monomer corresponding sets) and C220E/P228E/368E paired with C220R/E224R/P228R/K409R.

[0336] In some embodiments, the skew variants advantageously and simultaneously favor heterodimerization based on both the “knobs and holes” mechanism as well as the “electrostatic steering” mechanism. In some embodiments, the heterodimeric antibody includes one or more sets of such heterodimerization skew variants. These variants come in “pairs” of “sets.” That is, one set of the pair is incorporated into the first monomer and the other set of the pair is incorporated into the second monomer. It should be noted that these sets do not necessarily behave as “knobs in holes” variants, with a one-to-one correspondence between a residue on one monomer and a residue on the other. That is, these pairs of sets may instead form an interface between the two monomers that encourages heterodimer formation and discourages homodimer formation, allowing the percentage of heterodimers that spontaneously form under biological conditions to be over 90%, rather than the expected 50% (25% homodimer A/A:50% heterodimer A/B:25% homodimer B/B). Exemplary heterodimerization “skew” variants are depicted in Tables 12-17 and 5. Such “skew” variants include, but are not limited to: S364K/E357Q:L368D/K370S; L368D/K370S:S364K; L368E/K370S:S364K; T411T/E360E/Q362E:D401K; L368D/K370S:S364K/E357L; K370S:S364K/E357Q (EU numbering).

[0337] In exemplary embodiments, the heterodimeric antibody includes a S364K/E357Q:L368D/K370S; L368D/K370S:S364K; L368E/K370S:S364K; T411T/E360E/Q362E:D401K; L368D/K370S:S364K/E357L; K370S:S364K/E357Q; or a T366S/L368A/Y407V:T366W (optionally including a bridging disulfide, T366S/L368A/Y407V/Y349C:T366W/S354C) “skew” variant amino acid substitution set (EU numbering). In an exemplary embodiment, the heterodimeric antibody includes a “S364K/E357Q:L368D/K370S” amino acid substitution set. In terms of nomenclature, the pair “S364K/E357Q:L368D/K370S” means that one of the monomers includes an Fc domain that includes the amino acid substitutions S364K and E357Q and the other monomer includes an Fc domain that includes the amino acid substitutions L368D and K370S; as above, the “strandedness” of these pairs depends on the starting pI.

[0338] In some embodiments, the subject antibody includes amino acid substitutions at an CH1/CL interface, and/or VH/VL interface that skews correct heavy chain/light chain pairing (see Example 3B). Both electrostatic steering and steric variants can be incorporated in the CH1/CL interface, and/or VH/VL interface to promote correct heavy chain/light chain pairing. Electrostatic steering skew variants at the CH1/CL interface include, for example, substitutions at positions K218 (e.g., K218D) in the CH1 and D122/E123 (e.g., D122K/E123K) in the CL (positions in EU numbering), see FIG. 4 and Table 27. Electrostatic steering skew variants at the CH1/CL interface include, for example, substitutions at positions K213/K218 (e.g., K213E/K218D) in the CH1 and D122/E123 (e.g., D122K/E123K) in the CL (positions in EU numbering), see FIG. 4 and Table 27. Steric skew variants at the CH1/CL interface include, for example, at positions A141 in the CH1 and F116 in the CL; A141 in the CH1 and F118 in the CL (e.g., A141F and F118A); and K147 in CH1 and S131 in the CL (positions in EU numbering), see FIGS. 5 and Table 28. Electrostatic steering skew variants at the VH/VL interface include, for example, those based on a hydrogen bonded pair formed by Q39 in the VH and Q38 in the VL (positions in Kabat numbering), e.g., Q39E:Q38K in VH:VL interface of one Fab of the antibody and Q39K:Q38E in VH:VL interface of the other Fab of the antibody (see FIG. 6). Additional electrostatic steering skew variants at the VH/VL interface are shown in Tables 18 and 19, which depict electrostatic variants which may be introduced at Q39:Q38 in the VH:VL interface. In some embodiments, the subject antibody includes a combination of electrostatic steering and steric variants at the VH/VL and/or CH1/CL interfaces.

TABLE 18

| | |
|---|---|
| Fab A | Fab B |

| VH | VL | VH | VL |
|---|---|---|---|
| Q39E | Q38K | Q39K | Q38E |
| Q39E | Q38K | Q39K | Q38D |
| Q39E | Q38K | Q39R | Q38E |
| Q39E | Q38K | Q39R | Q38D |
| Q39E | Q38K | Q39E | Q38K |
| Q39E | Q38K | Q39E | Q38R |
| Q39E | Q38K | Q39D | Q38K |
| Q39E | Q38K | Q39D | Q38R |
| Q39E | Q38R | Q39K | Q38E |
| Q39E | Q38R | Q39K | Q38D |
| Q39E | Q38R | Q39R | Q38E |
| Q39E | Q38R | Q39R | Q38D |
| Q39E | Q38R | Q39E | Q38K |
| Q39E | Q38R | Q39E | Q38R |
| Q39E | Q38R | Q39D | Q38K |
| Q39E | Q38R | Q39D | Q38R |
| Q39D | Q38K | Q39K | Q38E |
| Q39D | Q38K | Q39K | Q38D |
| Q39D | Q38K | Q39R | Q38E |
| Q39D | Q38K | Q39R | Q38D |
| Q39D | Q38K | Q39E | Q38K |
| Q39D | Q38K | Q39E | Q38R |
| Q39D | Q38K | Q39D | Q38K |
| Q39D | Q38K | Q39D | Q38R |
| Q39D | Q38R | Q39K | Q38E |
| Q39D | Q38R | Q39K | Q38D |
| Q39D | Q38R | Q39R | Q38E |
| Q39D | Q38R | Q39R | Q38D |
| Q39D | Q38R | Q39E | Q38K |
| Q39D | Q38R | Q39E | Q38R |
| Q39D | Q38R | Q39D | Q38K |
| Q39D | Q38R | Q39D | Q38R |
| Q39K | Q38E | Q39K | Q38E |
| Q39K | Q38E | Q39K | Q38D |
| Q39K | Q38E | Q39R | Q38E |
| Q39K | Q38E | Q39R | Q38D |
| Q39K | Q38E | Q39E | Q38K |
| Q39K | Q38E | Q39E | Q38R |
| Q39K | Q38E | Q39D | Q38K |
| Q39K | Q38E | Q39D | Q38R |
| Q39R | Q38E | Q39K | Q38E |

TABLE 19

| | |
|---|---|
| Fab A | Fab B |

| VH | VL | VH | VL |
|---|---|---|---|
| Q39R | Q38E | Q39K | Q38D |
| Q39R | Q38E | Q39R | Q38E |
| Q39R | Q38E | Q39R | Q38D |
| Q39R | Q38E | Q39E | Q38K |
| Q39R | Q38E | Q39E | Q38R |
| Q39R | Q38E | Q39D | Q38K |
| Q39R | Q38E | Q39D | Q38R |
| Q39K | Q38D | Q39K | Q38E |
| Q39K | Q38D | Q39K | Q38D |
| Q39K | Q38D | Q39R | Q38E |
| Q39K | Q38D | Q39R | Q38D |
| Q39K | Q38D | Q39E | Q38K |
| Q39K | Q38D | Q39E | Q38R |
| Q39K | Q38D | Q39D | Q38K |
| Q39K | Q38D | Q39D | Q38R |
| Q39R | Q38D | Q39K | Q38E |
| Q39R | Q38D | Q39K | Q38D |
| Q39R | Q38D | Q39R | Q38E |
| Q39R | Q38D | Q39R | Q38D |
| Q39R | Q38D | Q39E | Q38K |
| Q39R | Q38D | Q39E | Q38R |
| Q39R | Q38D | Q39D | Q38K |
| Q39R | Q38D | Q39D | Q38R |

[0339] In some embodiments, the antibody includes Q39E:Q38K mutations in the VH1:VL1 interface of the first Fab. In some embodiments, the antibody includes K213E/K218D:D122K/E123K mutations in the CH1:CL interface of the first Fab. In some embodiments, the antibody includes Q39E:Q38K mutations in the VH1:VL1 interface and K213E/K218D:D122K/E123K mutations in the CH1:CL interface of the first Fab. In some embodiments, the antibody includes Q39K:Q38E mutations in the VH2:VL2 interface of the second Fab. In some embodiments, the antibody includes A141F:F118A mutations in CH1:CL interface of the second Fab. In some embodiments, the antibody includes a Q39K:Q38E mutations in the VH2:VL2 interface and A141F:F118A mutations in the CH1:CL interface of the second Fab. In some embodiments, the antibody includes Q39E:Q38K mutations in the VH1:VL1 interface and K213E/K218D:D122K/E123K mutations in the CH1:CL interface of the first Fab and Q39K:Q38E mutations in the VH2:VL2 interface and A141F:F118A mutations in the CH1:CL interface of the second Fab.

[0340] In some embodiments, the skew variants provided herein can be optionally and independently incorporated with any other modifications, including, but not limited to, other skew variants (see, e.g., in FIG. 37 of US Publ. App. No. 2012/0149876, herein incorporated by reference, particularly for its disclosure of skew variants), pI variants, isotypic variants, FcRn variants, ablation variants, etc. into one or both of the first and second Fc domains of the heterodimeric antibody. Further, individual modifications can also independently and optionally be included or excluded from the subject the heterodimeric antibody.

[0341] In some embodiments, the skew variants outlined herein can be optionally and independently incorporated with any pI variant (or other variants such as Fc variants, FcRn variants, etc.) into one or both heavy chain monomers, and can be independently and optionally included or excluded from the subject heterodimeric antibodies.

### 2. Purification Variants

[0342] In some embodiments, the heterodimeric antibody includes purification variants that advantageously allow for the separation of heterodimeric proteins (e.g., anti-TL1A×anti-IL23 bispecific antibody) from homodimeric proteins.

[0343] There are several basic mechanisms that can lead to ease of purifying heterodimeric antibodies. For example, modifications to one or both of the antibody heavy chain monomers A and B such that each monomer has a different pI allows for the isoelectric purification of heterodimeric A-B antibody from monomeric A-A and B-B proteins. Alternatively, some scaffold formats, such as the “1+1 Fab-scFv-Fc” format, and the “2+1 Fab2-scFv-Fc” format, allows separation on the basis of size. As described above, it is also possible to “skew” the formation of heterodimers over homodimers using skew variants. Thus, a combination of heterodimerization skew variants and purification variants find particular use in the heterodimeric antibodies provided herein.

[0344] Additionally, as more fully outlined below, depending on the format of the heterodimeric antibody, purification variants either contained within the constant region and/or Fc domains of a monomer, and/or domain linkers can be used. In some embodiments, the heterodimeric antibody includes additional modifications for alternative functionalities that can also create pI changes, such as Fc, FcRn and KO variants.

[0345] In some embodiments, the subject heterodimeric antibodies provided herein include at least one monomer with one or more modifications that alter the pI of the monomer (i.e., a “pI variant”). In general, there are two general categories of pI variants: those that increase the pI of the protein (basic changes) and those that decrease the pI of the protein (acidic changes). As described herein, all combinations of these variants can be done: one monomer may be wild type, or a variant that does not display a significantly different pI from wild-type, and the other can be either more basic or more acidic. Alternatively, each monomer is changed, one to more basic and one to more acidic.

[0346] Depending on the format of the heterodimer antibody, pI variants can be either contained within the constant and/or Fc domains of a monomer, or charged linkers, either domain linkers or scFv linkers, can be used. That is, antibody formats that utilize scFv(s) such as “1+1 Fab-scFv-Fc”, format can include charged scFv linkers (either positive or negative), that give a further pI boost for purification purposes. Some 1+1 Fab-scFv-Fc and 2+1 Fab2-scFv-Fc formats are useful with just charged scFv linkers and no additional pI adjustments, although the invention does provide pI variants that are on one or both of the monomers, and/or charged domain linkers as well. In addition, additional amino acid engineering for alternative functionalities may also confer pI changes, such as Fc, FcRn and KO variants.

[0347] In subject heterodimeric antibodies that utilizes pI as a separation mechanism to allow the purification of heterodimeric proteins, amino acid variants are introduced into one or both of the monomer polypeptides. That is, the pI of one of the monomers (referred to herein for simplicity as “monomer A”) can be engineered away from monomer B, or both monomer A and B change be changed, with the pI of monomer A increasing and the pI of monomer B decreasing. As is outlined more fully below, the pI changes of either or both monomers can be done by removing or adding a charged residue (e.g., a neutral amino acid is replaced by a positively or negatively charged amino acid residue, e.g., glycine to glutamic acid), changing a charged residue from positive or negative to the opposite charge (aspartic acid to lysine) or changing a charged residue to a neutral residue (e.g., loss of a charge; lysine to serine). A number of these variants are shown in Tables 12-17 and 20.

[0348] Thus, in some embodiments, the subject heterodimeric antibody includes amino acid modifications in the constant regions that alter the isoelectric point (pI) of at least one, if not both, of the monomers of a dimeric protein to form “pI antibodies”) by incorporating amino acid substitutions (“pI variants” or “pI substitutions”) into one or both of the monomers. As shown herein, the separation of the heterodimers from the two homodimers can be accomplished if the pIs of the two monomers differ by as little as 0.1 pH unit, with 0.2, 0.3, 0.4 and 0.5 or greater all finding use in the present invention.

[0349] The number of pI variants to be included on each or both monomer(s) to get good separation will depend in part on the starting pI of the components, for example in the 1+1 Fab-scFv-Fc, 2+1 Fab2-scFv-Fc, 1+1 CLC and 2+1 CLC formats, the starting pI of the scFv (1+1 Fab-scFv-Fc, 2+1 Fab2-scFv-Fc) and Fab(s) of interest. That is, to determine which monomer to engineer or in which “direction” (e.g., more positive or more negative), the Fv sequences of the two target antigens are calculated and a decision is made from there. Different Fvs will have different starting pIs which are exploited in the present invention. In general, as outlined herein, the pIs are engineered to result in a total pI difference of each monomer of at least about 0.1 logs, with 0.2 to 0.5 being preferred as outlined herein.

[0350] In the case where pI variants are used to achieve heterodimerization, by using the constant region(s) of the heavy chain(s), a more modular approach to designing and purifying bispecific proteins, including antibodies, is provided. Thus, in some embodiments, heterodimerization variants (including skew and pI heterodimerization variants) are not included in the variable regions, such that each individual antibody must be engineered. In addition, in some embodiments, the possibility of immunogenicity resulting from the pI variants is significantly reduced by importing pI variants from different IgG isotypes such that pI is changed without introducing significant immunogenicity. Thus, an additional problem to be solved is the elucidation of low pI constant domains with high human sequence content, e.g., the minimization or avoidance of non-human residues at any particular position. Alternatively, or in addition to isotypic substitutions, the possibility of immunogenicity resulting from the pI variants is significantly reduced by utilizing isosteric substitutions (e.g., Asn to Asp; and Gln to Glu).

[0351] As discussed below, a side benefit that can occur with this pI engineering is also the extension of serum half-life and increased FcRn binding. That is, as described in US Publ. App. No. US 2012/0028304 (incorporated by reference in its entirety), lowering the pI of antibody constant domains (including those found in antibodies and Fc fusions) can lead to longer serum retention in vivo. These pI variants for increased serum half-life also facilitate pI changes for purification.

[0352] In addition, it should be noted that the pI variants give an additional benefit for the analytics and quality control process of bispecific antibodies, as the ability to either eliminate, minimize and distinguish when homodimers are present is significant. Similarly, the ability to reliably test the reproducibility of the heterodimeric antibody production is important.

[0353] In general, embodiments of particular use rely on sets of variants that include skew variants, which encourage heterodimerization formation over homodimerization formation, coupled with pI variants, which increase the pI difference between the two monomers to facilitate purification of heterodimers away from homodimers.

[0354] Exemplary combinations of pI variants are shown in Tables 12-17 and 20, and FIG. 30 of US Publ. App. No. 2016/0355608, all of which are herein incorporated by reference in its entirety and specifically for the disclosure of pI variants. Preferred combinations of pI variants are shown in Tables 12-17 and 20. As outlined herein and shown in the tables, these changes are shown relative to IgG1, but all isotypes can be altered this way, as well as isotype hybrids. In the case where the heavy chain constant domain is from IgG2-4, R133E and R133Q can also be used.

[0355] In one embodiment, one monomer comprises N208D/Q295E/N384D/Q418E/N421D substitutions. In one embodiment, a preferred combination of pI variants has one monomer (the negative Fab side) comprising 208D/295E/384D/418E/421D variants (N208D/Q295E/N384D/Q418E/N421D when relative to human IgG1) and a second monomer (the positive scFv side) comprising a positively charged scFv linker, including (GKPGS)₄ (SEQ ID NO: 16). However, the first monomer includes a CH1 domain, including position 208. Accordingly, in constructs that do not include a CH1 domain (for example for antibodies that do not utilize a CH1 domain on one of the domains), a preferred negative pI variant Fc set includes 295E/384D/418E/421D variants (Q295E/N384D/Q418E/N421D when relative to human IgG1).

[0356] Accordingly, in some embodiments, one monomer has a set of substitutions from Table 5 and the other monomer has a charged linker (either in the form of a charged scFv linker because that monomer comprises an scFv or a charged domain linker, as the format dictates, which can be selected from those depicted in Table 4).

[0357] In some embodiments, modifications are made in the hinge of the Fc domain, including positions 216, 217, 218, 219, 220, 221, 222, 223, 224, 225, 226, 227, 228, 229, and 230 based on EU numbering. Thus, pI mutations and particularly substitutions can be made in one or more of positions 216-230, with 1, 2, 3, 4 or 5 mutations finding use. Again, all possible combinations are contemplated, alone or with other pI variants in other domains.

[0358] Specific substitutions that find use in lowering the pI of hinge domains include, but are not limited to, a deletion at position 221, a non-native valine or threonine at position 222, a deletion at position 223, a non-native glutamic acid at position 224, a deletion at position 225, a deletion at position 235 and a deletion or a non-native alanine at position 236. In some cases, only pI substitutions are done in the hinge domain, and in others, these substitution(s) are added to other pI variants in other domains in any combination.

[0359] In some embodiments, mutations can be made in the CH2 region, including positions 233, 234, 235, 236, 274, 296, 300, 309, 320, 322, 326, 327, 334 and 339, based on EU numbering. It should be noted that changes in 233-236 can be made to increase effector function (along with 327A) in the IgG2 backbone. Again, all possible combinations of these 14 positions can be made; e.g., an antibody provided herein may include a variant Fc domain with 1, 2, 3, 4, 5, 6, 7, 8, 9 or 10 CH2 pI substitutions.

[0360] Specific substitutions that find use in lowering the pI of CH2 domains include, but are not limited to, a non-native glutamine or glutamic acid at position 274, a non-native phenylalanine at position 296, a non-native phenylalanine at position 300, a non-native valine at position 309, a non-native glutamic acid at position 320, a non-native glutamic acid at position 322, a non-native glutamic acid at position 326, a non-native glycine at position 327, a non-native glutamic acid at position 334, a non-native threonine at position 339, and all possible combinations within CH2 and with other domains.

[0361] In this embodiment, the modifications can be independently and optionally selected from position 355, 359, 362, 384, 389,392, 397, 418, 419, 444 and 447 (EU numbering) of the CH3 region. Specific substitutions that find use in lowering the pI of CH3 domains include, but are not limited to, a non-native glutamine or glutamic acid at position 355, a non-native serine at position 384, a non-native asparagine or glutamic acid at position 392, a non-native methionine at position 397, a non-native glutamic acid at position 419, a non-native glutamic acid at position 359, a non-native glutamic acid at position 362, a non-native glutamic acid at position 389, a non-native glutamic acid at position 418, a non-native glutamic acid at position 444, and a deletion or non-native aspartic acid at position 447.

[0362] In some embodiments, the anti-TL1A×anti-IL23 antibody includes amino acid substitutions in one of its Fc domains that reduces binding to Protein A. Such purification variants produces heterodimers with asymmetric binding to Protein A, which can in turn be used for separation of heterodimeric from homodimeric populations by a pH gradient. Exemplary purification amino acid substitutions that reduce binding to Protein A include, but are not limited to H435R and Y436F (IgG1 CH3 domain, EU numbering). See, e.g., US2010331527, which is incorporated by reference in its entirety, and specifically for pertinent disclosures relating to Fc domain modifications to reduce Protein A binding.

### 3. Isotypic Variants

[0363] In addition, many embodiments of the subject heterodimeric antibodies rely on the “importation” of pI amino acids at particular positions from one IgG isotype into another, thus reducing or eliminating the possibility of unwanted immunogenicity being introduced into the variants. A number of these are shown in FIG. 21 of US Publ. 2014/0370013, hereby incorporated by reference. That is, IgG1 is a common isotype for therapeutic antibodies for a variety of reasons, including high effector function. However, the heavy constant region of IgG1 has a higher pI than that of IgG2 (8.10 versus 7.31). By introducing IgG2 residues at particular positions into the IgG1 backbone, the pI of the resulting monomer is lowered (or increased) and additionally exhibits longer serum half-life. For example, IgG1 has a glycine (pI 5.97) at position 137, and IgG2 has a glutamic acid (pI 3.22); importing the glutamic acid will affect the pI of the resulting protein. As is described below, a number of amino acid substitutions are generally required to significantly affect the pI of the variant antibody. However, it should be noted as discussed below that even changes in IgG2 molecules allow for increased serum half-life.

[0364] In other embodiments, non-isotypic amino acid changes are made, either to reduce the overall charge state of the resulting protein (e.g., by changing a higher pI amino acid to a lower pI amino acid), or to allow accommodations in structure for stability, etc. as is further described below.

[0365] In addition, by pI engineering both the heavy and light constant domains, significant changes in each monomer of the heterodimer can be seen. As discussed herein, having the pIs of the two monomers differ by at least 0.5 can allow separation by ion exchange chromatography or isoelectric focusing, or other methods sensitive to isoelectric point.

### 4. Calculating pI

[0366] The pI of each monomer of the antibodies provided herein can depend on the pI of the variant heavy chain constant domain and the pI of the total monomer, including the variant heavy chain constant domain and the fusion partner. Thus, in some embodiments, the change in pI is calculated on the basis of the variant heavy chain constant domain, using the chart in the FIG. 19 of US Pub. 2014/0370013. As discussed herein, which monomer to engineer is generally decided by the inherent pI of the Fv and scaffold regions. Alternatively, the pI of each monomer can be compared.

5. PI Variants that Also Confer Better FcRn In Vivo Binding

[0367] In the case where the pI variant decreases the pI of the monomer, the pI variant can have the added benefit of improving serum retention in vivo.

[0368] Although still under examination, Fc regions are believed to have longer half-lives in vivo, because binding to FcRn at pH 6 in an endosome sequesters the Fc (Ghetie and Ward, 1997 Immunol Today. 18(12): 592-598, entirely incorporated by reference). The endosomal compartment then recycles the Fc to the cell surface. Once the compartment opens to the extracellular space, the higher pH, ~7.4, induces the release of Fc back into the blood. In mice, Dall' Acqua et al. showed that Fc mutants with increased FcRn binding at pH 6 and pH 7.4 actually had reduced serum concentrations and the same half-life as wild-type Fc (Dall' Acqua et al. 2002, J. Immunol. 169:5171-5180, entirely incorporated by reference). The increased affinity of Fc for FcRn at pH 7.4 is thought to forbid the release of the Fc back into the blood. Therefore, the Fc mutations that will increase Fc's half-life in vivo will ideally increase FcRn binding at the lower pH while still allowing release of Fc at higher pH. The amino acid histidine changes its charge state in the pH range of 6.0 to 7.4. Therefore, it is not surprising to find His residues at important positions in the Fc/FcRn complex.

[0369] Recently it has been suggested that antibodies with variable regions that have lower isoelectric points may also have longer serum half-lives (Igawa et al., 2010 PEDS. 23(5): 385-392, entirely incorporated by reference). However, the mechanism of this is still poorly understood. Moreover, variable regions differ from antibody to antibody. Constant region variants with reduced pI and extended half-life would provide a more modular approach to improving the pharmacokinetic properties of antibodies, as described herein.

### E. Additional Fc Variants for Additional Functionality

[0370] In addition to the heterodimerization variants discussed above, there are a number of useful Fc amino acid modification that can be made for a variety of reasons, including, but not limited to, altering binding to one or more FcγR receptors, altered binding to FcRn receptors, etc., as discussed below.

[0371] Accordingly, the anti-TL1A, anti-IL23, and anti-TL1A×anti-IL23 antibodies provided herein (heterodimeric, as well as homodimeric) can include such amino acid modifications with or without the heterodimerization variants outlined herein (e.g., the pI variants and steric variants). Each set of variants can be independently and optionally included or excluded from any particular heterodimeric protein.

### 1. FcγR and FcRn Variants

[0372] Accordingly, there are a number of useful Fc substitutions that can be made to alter binding to one or more of the FcγR receptors. In certain embodiments, the subject antibody includes modifications that alter the binding to one or more FcγR receptors (i.e., “FcγR variants”). Substitutions that result in increased binding as well as decreased binding can be useful. For example, it is known that increased binding to FcγRIIIa generally results in increased ADCC (antibody dependent cell-mediated cytotoxicity; the cell-mediated reaction wherein nonspecific cytotoxic cells that express FcγRs recognize bound antibody on a target cell and subsequently cause lysis of the target cell). Similarly, decreased binding to FcγRIIb (an inhibitory receptor) can be beneficial as well in some circumstances. Amino acid substitutions that find use in the subject antibodies include those listed in U.S. Pat. No. 8,188,321 (particularly FIG. 41) and U.S. Pat. No. 8,084,582, and US Publ. App. Nos. 20060235208 and 20070148170, all of which are expressly incorporated herein by reference in their entirety and specifically for the variants disclosed therein that affect Fcγ receptor binding. Particular variants that find use include, but are not limited to, 236A, 239D, 239E, 332E, 332D, 239D/332E, 267D, 267E, 328F, 267E/328F, 236A/332E, 239D/332E/330Y, 239D, 332E/330L, 243A, 243L, 264A, 264V and 299T. Such modification may be included in one or both Fc domains of the subject antibody.

[0373] In some embodiments, the subject antibody includes one or more Fc modifications that increase serum half-life. Fc substitutions that find use in increased binding to the FcRn receptor and increased serum half-life, as specifically disclosed in US 2009-0163699 A1, hereby incorporated by reference in its entirety, include, but are not limited to, 434S, 434A, 428L, 308F, 259I, 428L/434S, 259I/308F, 436I/428L, 436I or V/434S, 436V/428L, 259I/308F/428L, and M252Y/S254T/T256E. In some embodiments, M428L/N434S substitutions are used. Such modification may be included in one or both Fc domains of the subject antibody. 2. Ablation Variants

[0374] In some embodiments, the subject antibody includes one or more modifications that reduce or remove the normal binding of the Fc domain to one or more or all of the Fcγ receptors (e.g., FcγR1, FcγRIIa, FcγRIIb, FcγRIIIa, etc.) to avoid additional mechanisms of action. Such modifications are referred to as “FcγR ablation variants” or “Fc knock out (FcKO or KO)” variants. In these embodiments, for some therapeutic applications, it is desirable to reduce or remove the normal binding of the Fc domain to one or more or all of the Fcγ receptors (e.g., FcγR1, FcγRIIa, FcγRIIb, FcγRIIIa, etc.) to avoid additional mechanisms of action. That is, for example, in many embodiments, it is generally desirable to ablate FcγRIIIa binding to eliminate or significantly reduce ADCC activity. In some embodiments, of the subject antibodies described herein, at least one of the Fc domains comprises one or more Fcγ receptor ablation variants. In some embodiments, of the subject antibodies described herein, both of the Fc domains comprises one or more Fcγ receptor ablation variants. These ablation variants are depicted in Table 1, and each can be independently and optionally included or excluded, with preferred aspects utilizing ablation variants selected from the group consisting of: L234A/L235A/D265S, G236R/L328R, E233P/L234V/L235A/G236del/S239K, E233P/L234V/L235A/G236del/S267K, E233P/L234V/L235A/G236del/S239K/A327G, E233P/L234V/L235A/G236del/S267K/A327G and E233P/L234V/L235A/G236del. In some embodiments, E233P/L234V/L235A/G236del/S267K substitutions are used. It should be noted that the ablation variants referenced herein ablate FcγR binding but generally not FcRn binding.

[0375] The Fc domain of human IgG1 has the highest binding to the Fcγ receptors, and thus ablation variants can be used when the constant domain (or Fc domain) in the backbone of the subject antibody is IgG1. Alternatively, or in addition to ablation variants in an IgG1 background, mutations at the glycosylation position 297 (generally to A or S) can significantly ablate binding to FcγRIIIa, for example. Human IgG2 and IgG4 have naturally reduced binding to the Fc receptors, and thus those backbones can be used with or without the ablation variants.

### F. Combination of Heterodimeric and Fc Variants

[0376] All of the recited heterodimerization variants (including skew and/or purification variants) can be optionally and independently combined in any way, as long as they retain their “strandedness” or “monomer partition.” In addition, all of these variants can be combined into any of the heterodimerization formats.

[0377] In the case of pI variants, while embodiments finding particular use are shown in the tables, other combinations can be generated, following the basic rule of altering the pI difference between two monomers to facilitate purification.

[0378] In addition, any of the heterodimerization variants (skew and purification variants), are also independently and optionally combined with Fc ablation variants, Fc variants, FcRn variants, as generally outlined herein.

[0379] Exemplary combination of variants that are included in some embodiments of the heterodimeric 1+1 Fab-scFv-Fc, 2+1 mAb-Fc, 2+1 Fab2-scFv-Fc, and 2+1 Fab2-Fc×scFv-Fc format antibodies are included in Table 5. In some embodiments, the heterodimeric antibody includes a combination of variants as depicted in Table 5.

[0380] In some embodiments, the first heavy chain constant domain comprises amino acid substitutions E233P/L234V/L235A/G236del/S267K and/or the second heavy chain constant domain comprises amino acid substitutions E233P/L234V/L235A/G236del/S267K, wherein numbering is according to EU numbering. In some embodiments, the first heavy chain constant domain comprises amino acid substitutions E233P/L234V/L235A/G236del/S267K and the second heavy chain constant domain comprises amino acid substitutions E233P/L234V/L235A/G236del/S267K, wherein numbering is according to EU numbering.

[0381] In some embodiments, the first heavy chain constant domain comprises amino acid substitutions M428L/N434S and/or the second heavy chain constant domain comprises amino acid substitutions M428L/N434S, wherein numbering is according to EU numbering. In some embodiments, the first heavy chain constant domain comprises amino acid substitutions M428L/N434S and the second heavy chain constant domain comprises amino acid substitutions M428L/N434S, wherein numbering is according to EU numbering.

[0382] In some embodiments, the first heavy chain constant domain comprises amino acid substitutions E233P/L234V/L235A/G236del/S267K and M428L/N434S and/or the second heavy chain constant domain comprises amino acid substitutions E233P/L234V/L235A/G236del/S267K and M428L/N434S, wherein numbering is according to EU numbering. In some embodiments, the first heavy chain constant domain comprises amino acid substitutions E233P/L234V/L235A/G236del/S267K and M428L/N434S and the second heavy chain constant domain comprises amino acid substitutions E233P/L234V/L235A/G236del/S267K and M428L/N434S, wherein numbering is according to EU numbering.

[0383] In some embodiments, the first heavy chain constant domain or the second heavy chain constant domain comprises amino acid substitutions L368D/K370S, wherein numbering is according to EU numbering. In some embodiments, the first heavy chain constant domain or the second heavy chain constant domain comprises amino acid substitutions E357Q/S364K, wherein numbering is according to EU numbering. In some embodiments, the first heavy chain constant domain comprises amino acid substitutions L368D/K370S, and the second heavy chain constant domain comprises amino acid substitutions E357Q/S364K, wherein numbering is according to EU numbering.

[0384] In some embodiments, the first heavy chain constant domain or the second heavy chain constant domain comprises amino acid substitutions N208D/Q295E/N384D/Q418E/N421D, wherein numbering is according to EU numbering. In some embodiments, the first heavy chain constant domain comprises amino acid substitutions N208D/Q295E/N384D/Q418E/N421D, wherein numbering is according to EU numbering.

[0385] In some embodiments, the first heavy chain constant domain or the second heavy chain constant domain comprises amino acid substitutions E233P/L234V/L235A/G236del/S267K, M428L/N434S, L368D/K370S, and N208D/Q295E/N384D/Q418E/N421D, wherein numbering is according to EU numbering. In some embodiments, the first heavy chain constant domain comprises amino acid substitutions E233P/L234V/L235A/G236del/S267K, M428L/N434S, L368D/K370S, and N208D/Q295E/N384D/Q418E/N421D, wherein numbering is according to EU numbering.

[0386] In some embodiments, the first heavy chain constant domain or the second heavy chain constant domain comprises amino acid substitutions E233P/L234V/L235A/G236del/S267K, M428L/N434S, and E357Q/S364K, wherein numbering is according to EU numbering. In some embodiments, the second heavy chain constant domain comprises amino acid substitutions E233P/L234V/L235A/G236del/S267K, M428L/N434S, and E357Q/S364K, wherein numbering is according to EU numbering.

[0387] In some embodiments, the first heavy chain constant domain comprises amino acid substitutions E233P/L234V/L235A/G236del/S267K, M428L/N434S, L368D/K370S, and N208D/Q295E/N384D/Q418E/N421D, and the second heavy chain constant domain comprises amino acid substitutions E233P/L234V/L235A/G236del/S267K, M428L/N434S, and E357Q/S364K, wherein numbering is according to EU numbering.

### G. Useful Antibody Formats

[0388] As discussed more fully below, the heterodimeric bispecific antibodies provided herein can take on several different configurations as generally depicted in FIG. 1.

[0389] The heterodimeric formats of the invention can have different valencies as well as be bispecific. That is, heterodimeric antibodies of the invention can be bivalent and bispecific, or trivalent and bispecific, wherein the first antigen is bound by two binding domains and the second antigen by a second binding domain.

[0390] The present invention utilizes TL1A binding domains in combination with IL23 binding domains. Any collection of anti-TL1A CDRs, anti-TL1A variable light and variable heavy domains, Fabs and scFvs as depicted in any of the tables (see particularly Tables 44, 7-10, 22, 23, 26, 29-34, and 48, and VH sequences in SEQ ID NOS: 1427-1823 and 2316-2330 and VL sequences in SEQ ID NOS: 1824-1923, and VH/VL pairs set forth in SEQ ID NOS: 2331-2363, or see particularly Tables 7-10) or variants thereof can be used. Similarly, any of the IL23 antigen-binding domains can be used, whether CDRs, variable light and variable heavy domains, Fabs and scFvs as depicted in any of the tables (e.g., Tables 44, 11, 24-26, 29-34, and 49 and the VH sequences in SEQ ID NOS: 1927-2132 and VL sequences in SEQ ID NOS: 2133-2232, and VH/VL pairs set forth in SEQ ID NOS: 2364-2379, or e.g., Table 11) or variants thereof can be used, optionally and independently combined in any combination.

### 1. 1+1 Fab-scFv-Fc Format

[0391] One heterodimeric antibody format that finds particular use in subject anti-TL1A×anti-IL23 antibodies provided herein is the “1+1 Fab-scFv-Fc” or “bottle opener” format as shown in FIG. 1, panel A. The 1+1 Fab-scFv-Fc format antibody includes a first monomer that is a “regular” heavy chain (VH1-CH1-hinge-CH2-CH3), wherein VH1 is a first variable heavy domain and CH2-CH3 is a first Fc domain. The 1+1 Fab-scFv-Fc also includes a light chain that includes a first variable light domain VL1 and a constant light domain CL. The light chain interacts with the VH1-CH1 of the first monomer to form a first antigen-binding domain that is a Fab. The second monomer of the antibody includes a second binding domain that is a single chain Fv (“scFv,” as defined below) and a second Fc domain. The scFv includes a second variable heavy domain (VH2) and a second variable light domain (VL2), wherein the VH2 is attached to the VL2 using an scFv linker that can be charged (see, e.g., Table 4). The scFv is attached to the heavy chain using a domain linker (see, e.g., Table 6). The two monomers are brought together by the use of amino acid variants (e.g., heterodimerization variants, discussed above) in the constant regions (e.g., the Fc domain, the CH1 domain and/or the hinge region) that promote the formation of heterodimeric antibodies as is described more fully below. This structure is sometimes referred to herein as the “bottle-opener” format, due to a rough visual similarity to a bottle-opener. In some embodiments, the 1+1 Fab-scFv-Fc format antibody is a bivalent antibody.

[0392] There are several distinct advantages to the present “1+1 Fab-scFv-Fc” format. Antibody analogs relying on two scFv constructs often have stability and aggregation problems, which can be alleviated in the present invention by the addition of a “regular” heavy and light chain pairing. In addition, as opposed to formats that rely on two heavy chains and two light chains, there is no issue with the incorrect pairing of heavy and light chains (e.g., heavy 1 pairing with light 2, etc.).

[0393] In some embodiments of the 1+1 Fab-scFv-Fc format antibody, one of the first or second antigen-binding domain is a TL1A binding domain and the other binding domain is a IL23 binding domain. In some embodiments where the 1+1 Fab-scFv-Fc, it is the scFv that binds to the TL1A, and the Fab that binds IL23. Exemplary anti-TL1A×anti-IL23 bispecific antibody in the 1+1 Fab-scFv-Fc format are depicted in Tables 26 and 31 (affinity optimized).

[0394] In some embodiments, the first and second Fe domains of the 1+1 Fab-scFv-Fc format antibody are variant Fe domains that include heterodimerization skew variants (e.g., a set of amino acid substitutions as shown in Tables 12-17 and 5). Particularly useful heterodimerization skew variants include S364K/E357Q:L368D/K370S; L368D/K370S:S364K; L368E/K370S:S364K; T411T/E360E/Q362E:D401K; L368D/K370S:S364K/E357L; K370S:S364K/E357Q; T366S/L368A/Y407V:T366W and T366S/L368A/Y407V/Y349C:T366W/S354C (EU numbering)). In exemplary embodiments, one of the first or second variant Fe domains includes heterodimerization skew variants L368D/K370S and the other of the first or second variant Fe domains includes heterodimerization skew variants S364K/E357Q, wherein numbering is according to EU numbering. In exemplary embodiments, the first variant Fc domain includes heterodimerization skew variants L368D/K370S and the second variant Fc domain includes heterodimerization skew variants S364K/E357Q, wherein numbering is according to EU numbering.

[0395] In some embodiments, the variant Fe domains include ablation variants (including those shown in Table 1). In some embodiments, each of the first and second variant Fe domains include ablation variants E233P/L234V/L235A/G236_/S267K, wherein numbering is according to EU numbering.

[0396] In some embodiments, the constant domain (CH1-hinge-CH2-CH3) of the first monomer includes pI variants (including those shown in Tables 12-17 and 20). In exemplary embodiments, the constant domain (CH1-hinge-CH2-CH3) of the first monomer includes pI variants N208D/Q295E/N384D/Q418E/N421D, wherein numbering is according to EU numbering.

[0397] In exemplary embodiments, the 1+1 Fab-scFv-Fc format antibody includes a combination of amino acid modifications as depicted in Table 5. In such embodiments, the CH1-hinge-CH2-CH3 of the first monomer comprises amino acid variants L368D/K370S/N208D/Q295E/N384D/Q418E/N421D/E233P/L234V/L235A/G236del/S267 K, the second Fc domain comprises amino acid variants S364K/E357Q/E233P/L234V/L235A/G236del/S267K, wherein numbering is according to EU numbering.

[0398] In some embodiments, the scFv of the 1+1 Fab-scFv-Fc format antibody provided herein includes a charged scFv linker (including those shown in Table 4). In some embodiments, the 1+1 Fab-scFv-Fc format antibody provided herein includes FcRn variants M428L/N434S, wherein numbering is according to EU numbering.

[0399] In exemplary embodiments 1+1 Fab-scFv-Fc format antibody, the first Fc domain includes heterodimerization skew variants L368D/K370S and the second Fc domain includes heterodimerization skew variants S364K/E357Q; each of the first and second Fc domains include ablation variants E233P/L234V/L235A/G236_/S267K; and the constant domain (CH1-hinge-CH2-CH3) of the first monomer includes pI variants N208D/Q295E/N384D/Q418E/N421D, wherein numbering is according to EU numbering. In some embodiments, the scFv of the 1+1 Fab-scFv-Fc format antibody provided herein includes a (GKPGS)₄ (SEQ ID NO: 16) charged scFv linker. In some embodiments, the 1+1 Fab-scFv-Fc format antibody provided herein includes FcRn variants M428L/N434S, wherein numbering is according to EU numbering. In some embodiments, the scFv of the 1+1 Fab-scFv-Fc format antibody provided herein includes a charged scFv linker (including those shown in Table 4).

[0400] Any suitable TL1A binding domain can be included in subject 1+1 Fab-scFv-Fc format antibody, including any of the TL1A binding domains provided herein (see e.g., Tables 44, 7-10, 22, 23, 26, 29-34, and 48, and VH sequences in SEQ ID NOS: 1427-1823 and 2316-2330 and VL sequences in SEQ ID NOS: 1824-1923, and VH/VL pairs set forth in SEQ ID NOS: 2331-2363, or see, e.g., Tables 7-10 and 23). In some embodiments, the TL1A binding domain is one of the following TL1a binding domains or a variant thereof: 70416_041[TL1a]_H1L1, 70417_111 [TL1a]_H1L1, 70392_069 [TL1a]_H1L1, 70392_189 [TL1a]_H1L1, 70416_092 [TL1a]_H1L1, 70392_201 [TL1a]_H1L1, 70416_073 [TL1a]_H1L1, 70392_074 [TL1a]_H1L1, 70416_094 [TL1a]_H1L1, 70392_292 [TL1a]_H1L1 (Tables 7-10).

[0401] Any suitable IL23 binding domain can be included in subject 1+1 Fab-scFv-Fc format antibody, including any of the IL23 binding domains provided herein (see e.g., Tables 44, 11, 24-26, 29-34, and 49 and the VH sequences in SEQ ID NOS: 1927-2132 and VL sequences in SEQ ID NOS: 2133-2232, and VH/VL pairs set forth in SEQ ID NOS: 2364-2379, or see, e.g., SEQ ID NOS: 90-95 and FIG. 5). In some embodiments, the IL23 binding domain is IL23-A[IL23]_H1L1 (Table 11) or a variant thereof.

[0402] Exemplary Fc domain sequences that are useful in the 1+1 Fab-scFv-Fc format antibodies are provided in SEQ ID NOS: 58-87 (corresponding SEQ ID NOS for each heterodimeric Fc backbone are provided in the Brief Description of Sequences). These are heterodimeric anti-TL1A×anti-IL23 bsAb backbones based on human IgG1, without the cytokine sequences. Heterodimeric Fc backbone 1 is based on human IgG1 (356E/358M allotype), and includes the L368D/K370S skew variants and the Q295E/N384D/Q418E/N421D pI variants on a first heterodimeric Fc chain, the S364K/E357Q skew variants on a second heterodimeric Fc chain, and the E233P/L234V/L235A/G236del/S267K ablation variants on both chains. Heterodimeric Fc backbone 2 is based on human IgG1 (356E/358M allotype), and includes the L368D/K370S skew variants and the Q295E/N384D/Q418E/N421D pI variants on a first heterodimeric Fc chain, the S364K skew variant on a second heterodimeric Fc chain, and the E233P/L234V/L235A/G236del/S267K ablation variants on both chains. Heterodimeric Fc backbone 3 is based on human IgG1 (356E/358M allotype), and includes the L368E/K370S skew variants and the Q295E/N384D/Q418E/N421D pI variants on a first heterodimeric Fc chain, the S364K skew variant on a second heterodimeric Fc chain, and the E233P/L234V/L235A/G236del/S267K ablation variants on both chains. Heterodimeric Fc backbone 4 is based on human IgG1 (356E/358M allotype), and includes the K360E/Q362E/T411E skew variants and the Q295E/N384D/Q418E/N421D pI variants on a first heterodimeric Fc chain, the D401K skew variant on a second heterodimeric Fc chain, and the E233P/L234V/L235A/G236del/S267K ablation variants on both chains. Heterodimeric Fc backbone 5 is based on human IgG1 (356D/358L allotype), and includes the L368D/K370S skew variants and the Q295E/N384D/Q418E/N421D pI variants on a first heterodimeric Fc chain, the S364K/E357Q skew variants on a second heterodimeric Fc chain, and the E233P/L234V/L235A/G236del/S267K ablation variants on both chains. Heterodimeric Fc backbone 6 is based on human IgG1 (356E/358M allotype), and includes the L368D/K370S skew variants and the Q295E/N384D/Q418E/N421D pI variants on a first heterodimeric Fc chain, the S364K/E357Q skew variants on a second heterodimeric Fc chain, and the E233P/L234V/L235A/G236del/S267K ablation variants and N297A variant that removes glycosylation on both chains. Heterodimeric Fc backbone 7 is based on human IgG1 (356E/358M allotype), and includes the L368D/K370S skew variants and the Q295E/N384D/Q418E/N421D pI variants on a first heterodimeric Fc chain, the S364K/E357Q skew variants on a second heterodimeric Fc chain, and the E233P/L234V/L235A/G236del/S267K ablation variants and N297S variant that removes glycosylation on both chains. Heterodimeric Fc backbone 8 is based on human IgG4, and includes the L368D/K370S skew variants and the Q295E/N384D/Q418E/N421D pI variants on a first heterodimeric Fc chain, the S364K/E357Q skew variants on a second heterodimeric Fc chain, and the S228P (according to EU numbering, S241P in Kabat) variant that ablates Fab arm exchange (as is known in the art) on both chains. Heterodimeric Fc backbone 9 is based on human IgG2, and includes the L368D/K370S skew variants and the Q295E/N384D/Q418E/N421D pI variants on a first heterodimeric Fc chain, the S364K/E357Q skew variants on a second heterodimeric Fc chain. Heterodimeric Fc backbone 10 is based on human IgG2, and includes the L368D/K370S skew variants and the Q295E/N384D/Q418E/N421D pI variants on a first heterodimeric Fc chain, the S364K/E357Q skew variants on a second heterodimeric Fc chain, and the S267K ablation variant on both chains. Heterodimeric Fc backbone 11 is based on human IgG1 (356E/358M allotype), and includes the L368D/K370S skew variants and the Q295E/N384D/Q418E/N421D pI variants on a first heterodimeric Fc chain, the S364K/E357Q skew variants on a second heterodimeric Fc chain, and the E233P/L234V/L235A/G236del/S267K ablation variants and M428L/N434S Xtend variants on both chains. Heterodimeric Fc backbone 12 is based on human IgG1 (356E/358M allotype), and includes the L368D/K370S skew variants on a first heterodimeric Fc chain, the S364K/E357Q skew variants and P217R/P229R/N276K pI variants on a second heterodimeric Fc chain, and the E233P/L234V/L235A/G236del/S267K ablation variants on both chains. Heterodimeric Fc backbone 13 is based on human IgG1 (356D/358L allotype), and includes the L368D/K370S skew variants and the Q295E/N384D/Q418E/N421D pI variants on a first heterodimeric Fc chain, the S364K/E357Q skew variants on a second heterodimeric Fc chain, and the E233P/L234V/L235A/G236del/S267K ablation variants and M428L/N434S Xtend variants on both chains. Heterodimeric Fc backbone 14 is based on human IgG1 (356E/358M allotype), and includes the L368D/K370S skew variants and the Q295E/N384D/Q418E/N421D pI variants on a first heterodimeric Fc chain, the S364K/E357Q skew variants on a second heterodimeric Fc chain, and the E233P/L234V/L235A/G236del/S267K ablation variants and M428L/N434A Xtend variants on both chains. Heterodimeric Fc backbone 15 is based on human IgG1 (356D/358L allotype), and includes the L368D/K370S skew variants and the Q295E/N384D/Q418E/N421D pI variants on a first heterodimeric Fc chain, the S364K/E357Q skew variants on a second heterodimeric Fc chain, and the E233P/L234V/L235A/G236del/S267K ablation variants and M428L/N434A Xtend variants on both chains.

[0403] Included within each of these backbones are sequences that are 90, 95, 98 and 99% identical (as defined herein) to the recited sequences, and/or contain from 1, 2, 3, 4, 5, 6, 7, 8, 9 or 10 additional amino acid substitutions (as compared to the “parent” sequence, which, as will be appreciated by those in the art, already contain a number of amino acid modifications as compared to the parental human IgG1 (or IgG2 or IgG4, depending on the backbone). That is, the recited backbones may contain additional amino acid modifications (generally amino acid substitutions) in addition or as an alternative to the skew, pI and ablation variants contained within the backbones of the sequence. Additionally, the backbones depicted herein may include deletion of the C-terminal glycine (G446_) and/or lysine (K447_). The C-terminal glycine and/or lysine deletion may be intentionally engineered to reduce heterogeneity or in the context of certain bispecific formats, such as the mAb-scFv format. Additionally, C-terminal glycine and/or lysine deletion may occur naturally for example during production and storage.

[0404] Exemplary CH1-hinge domains, CH1 domains, and hinge domains that can be included in the first or second monomer of the 1+1 Fab-scFv-Fc format are provided in SEQ ID NOS: 90-98. Further, useful CL sequences that can be used with this format, i.e., constant domain of the cognate light chains that find use in the subject anti-TL1A×anti-IL23 bsAbs that utilize a Fab binding domain, are provided in SEQ ID NOS: 99 and 100.

[0405] Exemplary anti-TL1A×anti-IL23 bispecific antibodies in the 1+1 Fab-scFv-Fc format are depicted in Table 26. In certain embodiments, a bispecific antibody comprises any of the antibodies depicted in Table 26 or a variant thereof. In some embodiments, an anti-TL1A×anti-IL23 antibody comprises a heavy chain and/or a light chain having 1, 2, 3, 4, 5, 6, 7, 8, 9 or 10 amino acid changes from any of the above heavy chains and light chains. In some embodiments, an anti-TL1A×anti-IL23 antibody comprises a heavy chain and/or a light chain at least 90%, 95%, 97%, 98%, or 99% identical to any of the above heavy chains and light chains. In some embodiments, the amino acid changes are in a constant region but not in a variable region. In some embodiments, the amino acid changes are in a constant region or in a framework region (e.g., FR1, FR2, FR3, or FR4) but not in a CDR. In some embodiments, the changes are amino acid substitutions at one, two, three, or more of the following residues: (a) rare framework residues that differ between the murine antibody framework (i.e., donor antibody framework) and the human antibody framework (i.e., acceptor antibody framework); (b) Vernier zone residues when differing between donor antibody framework and acceptor antibody framework; (c) interchain packing residues at the VH/VL interface that differ between the donor antibody framework and the acceptor antibody framework; (d) canonical residues which differ between the donor antibody framework and the acceptor antibody framework sequences, particularly the framework regions crucial for the definition of the canonical class of the murine antibody CDR loops; (e) residues that are adjacent to a CDR; (g) residues capable of interacting with the antigen; (h) residues capable of interacting with the CDR; and (i) contact residues between the VH domain and the VL domain. In some embodiments, the substitutions are residues that are adjacent to a CDR, residues capable of interacting with the antigen, or residues capable of interacting with the CDR. Regarding the TL1A binding domain, in some embodiments, the VH sequence includes 53Y (i.e., a Y at position 53) and/or 100V (i.e., a V at position 100) as numbered by Kabat.

### 2. OrthoFab

[0406] One heterodimeric antibody format that finds particular use in subject anti-TL1A×anti-IL23 antibodies provided herein is the “OrthoFab” format that facilitates correct VH/VL pairings. In this format, the antibody is an IgG format antibody with two heavy chains and two light chains. The first heavy chain is according to VH1-CH1-hinge-CH2-CH3, and the second heavy chain is VH2-CH1-hinge-CH2-CH3, wherein VH1 is a first variable heavy domain, VH2 is a second variable heavy domain, CH2-CH3 of the first heavy chain is a first Fc domain, and CH2-CH3 of the second heavy chain is a second Fc domain. The first light chain is VL1-CL, and the second light chain is VL2-CL, wherein VL1 is a first variable light domain, and VL2 is a second variable light domain. The VH1 and VL1 form a first antigen-binding domain, and the VH2 and VL2 form a second antigen-binding domain, where one of the first and second antigen-binding domains is the TL1A binding domain, and the other of the first and second antigen-binding domains is the IL23 binding domain.

[0407] The OrthoFab format further includes amino acid substitutions at one or more CH1/CL interfaces, and/or VH/VL interfaces that skews correct heavy chain/light chain pairing (see Example 3B). Both electrostatic steering and steric variants can be incorporated in the CH1/CL interface and/or VH/VL interface to promote correct heavy chain/light chain pairing.

[0408] In some embodiments, the antibody includes electrostatic steering skew variants at an CH1/CL interface. In some embodiments, the antibody includes a CH1/CL with electrostatic steering skew variants selected from variants depicted in FIG. 4 or Table 27. In some embodiments, the antibody includes a CH1/CL with steric skew variants selected from variants depicted in FIG. 5 or 6. In some embodiments, the antibody includes a VH/VL with electrostatic steering skew variants selected from variants depicted in FIG. 6 or Tables 18 and 19.

[0409] In some embodiments, the antibody includes a combination of one or more of the CH1/CL electrostatic steering and/or steric skew variants, and VH/VL electrostatic steering skew variants depicted in FIGS. 4-7 and Tables 27-28 and 18-19. In some embodiments, the first heavy chain and first light chain each include a) a CH1/CL with electrostatic steering and/or steric skew variants and b) a VH1/VL1 with electrostatic steering variants. In some embodiments, the second heavy chain and second light chain further includes a) a CH1/CL with electrostatic steering and/or steric skew variants and b) a VH2/VL2 with electrostatic steering variants. In some embodiments, the antibody includes Q39E:Q38K mutations in the VH1:VL1 interface of the first Fab. In some embodiments, the antibody includes K213E/K218D:D122K/E123K mutations in the CH1:CL interface of the first Fab. In some embodiments, the antibody includes Q39E:Q38K mutations in the VH1:VL1 interface and K213E/K218D:D122K/E123K mutations in the CH1:CL interface of the first Fab. In some embodiments, the antibody includes Q39K:Q38E mutations in the VH2:VL2 interface of the second Fab. In some embodiments, the antibody includes A141F:F118A mutations in CH1:CL interface of the second Fab. In some embodiments, the antibody includes a Q39K:Q38E mutations in the VH2:VL2 interface and A141F:F118A mutations in the CH1:CL interface of the second Fab. In some embodiments, the antibody includes Q39E:Q38K mutations in the VH1:VL1 interface and K213E/K218D:D122K/E123K mutations in the CH1:CL interface of the first Fab and Q39K:Q38E mutations in the VH2:VL2 interface and A141F:F118A mutations in the CH1:CL interface of the second Fab.

[0410] In some embodiments, the first and second Fc domains of the OrthoFab format are variant Fc domains that include heterodimerization skew variants (e.g., a set of amino acid substitutions as shown in Tables 12-17 and 5). Particularly useful heterodimerization skew variants include S364K/E357Q:L368D/K370S; L368D/K370S:S364K; L368E/K370S:S364K; T411T/E360E/Q362E:D401K; L368D/K370S:S364K/E357L; K370S:S364K/E357Q; T366S/L368A/Y407V:T366W and T366S/L368A/Y407V/Y349C:T366W/S354C (EU numbering). In exemplary embodiments, one of the first or second variant Fc domains includes heterodimerization skew variants L368D/K370S and the other of the first or second variant Fc domains includes heterodimerization skew variants S364K/E357Q, wherein numbering is according to EU numbering. In exemplary embodiments, the first variant Fc domain includes heterodimerization skew variants L368D/K370S and the second variant Fc domain includes heterodimerization skew variants S364K/E357Q, wherein numbering is according to EU numbering. In some embodiments, the antibody includes Q39E:Q38K mutations in the VH1:VL1 interface and K213E/K218D:D122K/E123K mutations in the CH1:CL interface of the first Fab and Q39K:Q38E mutations in the VH2:VL2 interface and A141F:F118A mutations in the CH1:CL interface of the second Fab, and the first Fc domain includes heterodimerization skew variants L368D/K370S and the second Fc domain includes heterodimerization skew variants S364K/E357Q.

[0411] In some embodiments, the variant Fc domains include ablation variants (including those shown in Table 1). In some embodiments, each of the first and second variant Fc domains include ablation variants E233P/L234V/L235A/G236_/S267K, wherein numbering is according to EU numbering.

[0412] In some embodiments, the constant domain (CH1-hinge-CH2-CH3) of the first or second monomer includes pI variants (including those shown in Table 20). Table 20 depicts a list of isosteric variant antibody constant regions and their respective substitutions. pI_(−) indicates lower pI variants, while pI_(+) indicates higher pI variants. These variants can be optionally and independently combined with other variants, including heterodimerization variants, outlined herein. In exemplary embodiments, the constant domain (CH1-hinge-CH2-CH3) of the first or second monomer includes pI variants N208D/Q295E/N384D/Q418E/N421D, wherein numbering is according to EU numbering. In some embodiments, the constant domain of the first monomer includes pI variants N208D/Q295E/N384D/Q418E/N421D.

TABLE 20

| Variant constant region | Substitutions |
|---|---|
| pI-ISO(−) | I199T/N203D/K274Q/R355Q/N384S/ |
| | K392N/N397M/Q418E/K447_{—} |
| pI_ISO(−)-Fc only | K274Q/R355Q/N384S/K392N/ |
| | V397M/Q418E/K447_{—} |
| pI_(−)_isosteric_A | N208D/Q295E/N384D/Q418E/ |
| | N421D |
| pI_(−)_isosteric A-Fc only | Q295E/N384D/Q418E/N421D |
| pI_(−)_isosteric_B | N208D/Q295E/Q418E/N421D |
| pI_(−)_isosteric_B-Fc only | Q295E/Q418E/N421D |
| pI_ISO(+RR) | Q196K/I199T/P217R/P228R/ |
| | N276K |
| pI_ISO(+RR)-Fc only | P217R/P228R/N276K |
| pI_ISO(+) | Q196K/I199T/N276K |
| pI_ISO(+)-Fc only | N276K |
| pI_(+)_isosteric_A | E269Q/E272Q/E283Q/E357Q |
| pI_(+)_isosteric_B | E269Q/E272Q/E283Q |
| pI_(+)_isosteric_E269Q/E272Q | E269Q/E272Q |
| pI_(+)_isosteric_E269Q/E283Q | E269Q/E283Q |
| pI_(+)_isosteric_E272Q/E283Q | E272Q/E283Q |
| pI_(+)_isosteric_E269Q | E269Q |

[0413] In some embodiments, the OrthoFab format antibody provided herein includes FcRn variants M428L/N434S, wherein numbering is according to EU numbering. In some embodiments, each of the first and second variant Fc domains includes FcRn variants M428L/N434S.

[0414] In some embodiments, (i) the antibody includes Q39E:Q38K mutations in the VH1:VL1 interface and K213E/K218D:D122K/E123K mutations in the CH1:CL interface of the first Fab and Q39K:Q38E mutations in the VH12:VL2 interface and A141F:F118A mutations in the CH1:CL interface of the second Fab, (ii) the first Fc domain includes heterodimerization skew variants L368D/K370S and the second Fc domain includes heterodimerization skew variants S364K/E357Q, (iii) each of the first and second Fc domains includes ablation variants E233P/L234V/L235A/G236_/S267K, (iv) each of the first and second Fe domains includes FcRn variants M428L/N434S, and (v) the first heavy chain includes pI variants N208D/Q295E/N384D/Q418E/N421D.

[0415] Any suitable TL1A binding domain and TL23 domain can be included in subject OrthoFab format antibody, including any of the TL1A binding domains provided herein or a variant thereof (see, e.g., Tables 44, 7-10, 22, 23, 26, 29-34, and 48, and VH sequences in SEQ ID NOS: 1427-1823 and 2316-2330 and VL sequences in SEQ ID NOS: 1824-1923, and VH/VL pairs set forth in SEQ ID NOS: 2331-2363, or see, e.g., Tables 7-10 and 23) and IL23 binding domains provided herein or a variant thereof (see, e.g., Tables 44, 11, 24-26, 29-34, and 49 and the VH sequences in SEQ ID NOS: 1927-2132 and VL sequences in SEQ ID NOS: 2133-2232, and VH/VL pairs set forth in SEQ ID NOS: 2364-2379, or see, e.g., Table 11, or see, e.g., SEQ ID NOS: 90-95 and FIG. 5).

[0416] Exemplary anti-TL1A×anti-IL23 bispecific antibodies in the OrthoFab format are depicted in Tables 29 and 30. Other exemplary anti-TL1A×anti-IL23 bispecific antibodies in the OrthoFab format are depicted in Table 44. In certain embodiments, a bispecific antibody comprises any of the antibodies depicted in Table 55, 29, or 30 or a variant thereof. In some embodiments, an anti-TL1A×anti-TL23 antibody comprises a heavy chain and/or a light chain having 1, 2, 3, 4, 5, 6, 7, 8, 9 or 10 amino acid changes from any of the above heavy chains and light chains. In some embodiments, an anti-TL1A×anti-IL23 antibody comprises a heavy chain and/or a light chain at least 90%, 95%, 97%, 98%, or 99% identical to any of the above heavy chains and light chains. In some embodiments, the amino acid changes are in a constant region but not in a variable region. In some embodiments, the amino acid changes are in a constant region or in a framework region (e.g., FR1, FR2, FR3, or FR4) but not in a CDR. In some embodiments, the changes are amino acid substitutions at one, two, three, or more of the following residues: (a) rare framework residues that differ between the murine antibody framework (i.e., donor antibody framework) and the human antibody framework (i.e., acceptor antibody framework); (b) Vernier zone residues when differing between donor antibody framework and acceptor antibody framework; (c) interchain packing residues at the VH/VL interface that differ between the donor antibody framework and the acceptor antibody framework; (d) canonical residues which differ between the donor antibody framework and the acceptor antibody framework sequences, particularly the framework regions crucial for the definition of the canonical class of the murine antibody CDR loops; (e) residues that are adjacent to a CDR; (g) residues capable of interacting with the antigen; (h) residues capable of interacting with the CDR; and (i) contact residues between the VH domain and the VL domain. In some embodiments, the substitutions are residues that are adjacent to a CDR, residues capable of interacting with the antigen, or residues capable of interacting with the CDR. Regarding the TL1A binding domain, in some embodiments, the VH sequence includes 53Y (i.e., a Y at position 53) and/or 100V (i.e., a V at position 100) as numbered by Kabat.

### 3. CrossMab-VH-VL Charge-Swap 1+1 Format

[0417] One heterodimeric antibody format that finds particular use in subject anti-TL1A×anti-IL23 antibodies provided herein is the “CrossMab-VH-VL charge-swap 1+1” format (see Table 32). The CrossMab-VH-VL charge-swap 1+1 format is a Fab×Fab four chain bispecific antibody. In some embodiments, the first monomer of this format includes a first variable light domain (VL1) attached to a heavy chain constant domain comprising a CH1-hinge-CH2-CH3, wherein CH2-CH3 is a first Fc domain. In some embodiments, the second monomer of this format includes a first variable heavy domain (VH1) attached to a constant light domain (e.g., a CLκ). The third monomer comprises a canonical heavy chain that includes a VH2-CH1-hinge-CH2-CH3, wherein VH2 is a second variable heavy domain and CH2-CH3 is a second Fc domain. The fourth monomer comprises a canonical light chain that includes a VL2-CL, wherein VL2 is a second variable light domain and CL is a constant light domain (e.g., a CLκ). The first monomer and second monomer form a “crossed” arm, wherein VL1 and VH1 form a first antigen-binding domain that binds a first antigen, and the third monomer and forth monomer form a “non-crossed” arm, wherein VL2 and VH2 form a second antigen-binding domain that binds a second antigen.

[0418] In some embodiments, the heavy chain constant domain (e.g., CH1) of the third monomer and the light chain constant domain (e.g., CLκ) of the fourth monomer further include “charge” swap amino acid substitutions. In some embodiments, these “charge” swap substitutions comprise amino acid substitutions K213E/K218D (EU numbering) in the heavy chain constant domain of the third monomer, and the fourth monomer CL is a CLκ that comprises amino acid substitutions D112K/E123K (Kabat numbering).

[0419] Without being bound by any particular theory of operation, it is believed that the crossing of one arm (i.e., the “crossed” arm) and charge swap engineering on the “non-crossed”arm in this format greatly diminishes the mispairing of LCs without affecting the various other developability and biophysical parameters that might be used in development of a biological therapeutic.

[0420] In some embodiments, the constant light domain of the second monomer includes amino acid substitutions R108A/T109S (Kabat numbering). In some embodiments, the VL1 of the first monomer is attached to the CH1 of the first monomer by an SS linker. In some embodiments, the “crossed” arm includes isosteric variants N208D/Q295E/N384D/Q418E/N421D in the heavy chain constant domain of the first monomer, wherein numbering is according to EU numbering.

[0421] In some embodiments, the first and second Fc domains of the CrossMab-VH-VL charge-swap 1+1 format are variant Fc domains that include heterodimerization skew variants (e.g., a set of amino acid substitutions as shown in Tables 12-17 and 5). Particularly useful heterodimerization skew variants include S364K/E357Q:L368D/K370S; L368D/K370S:S364K; L368E/K370S:S364K; T411T/E360E/Q362E:D401K; L368D/K370S:S364K/E357L; K370S:S364K/E357Q; T366S/L368A/Y407V:T366W and T366S/L368A/Y407V/Y349C:T366W/S354C (EU numbering). In exemplary embodiments, one of the first or second variant Fc domains includes heterodimerization skew variants L368D/K370S and the other of the first or second variant Fc domains includes heterodimerization skew variants S364K/E357Q, wherein numbering is according to EU numbering. In exemplary embodiments, the first variant Fc domain includes heterodimerization skew variants L368D/K370S and the second variant Fc domain includes heterodimerization skew variants S364K/E357Q, wherein numbering is according to EU numbering.

[0422] In some embodiments, the variant Fc domains include ablation variants (including those shown in Table 1). In some embodiments, each of the first and second variant Fc domains include ablation variants E233P/L234V/L235A/G236_/S267K, wherein numbering is according to EU numbering.

[0423] In some embodiments, the constant domain (CH1-hinge-CH2-CH3) of the first or second monomer includes pI variants (including those shown in Table 20). In exemplary embodiments, the constant domain (CH1-hinge-CH2-CH3) of the first or second monomer includes pI variants N208D/Q295E/N384D/Q418E/N421D, wherein numbering is according to EU numbering.

[0424] In some embodiments, the CrossMab-VH-VL charge-swap 1+1 format antibody provided herein includes FcRn variants M428L/N434S, wherein numbering is according to EU numbering. In some embodiments, each of the first and second variant Fc domains includes FcRn variants M428L/N434S.

[0425] In exemplary embodiments, the first variant Fc domain includes heterodimerization skew variants L368D/K370S and the second variant Fc domain includes heterodimerization skew variants S364K/E357Q; each of the first and second variant Fc domains include ablation variants E233P/L234V/L235A/G236_/S267K; and the constant domain (CH1-hinge-CH2-CH3) of the first monomer includes pI variants N208D/Q295E/N384D/Q418E/N421D, wherein numbering is according to EU numbering.

[0426] In some embodiments, the CH1-hinge-CH2-CH3 of the first monomer comprises amino acid variants L368D/K370S/N208D/Q295E/N384D/Q418E/N421D/E233P/L234V/L235A/G236del/S267 K, and the second Fc domain comprises amino acid variants S364K/E357Q/E233P/L234V/L235A/G236del/S267K, wherein numbering is according to EU numbering.

[0427] In some embodiments, the CrossMab-VH-VL charge-swap 1+1 format antibody provided herein further includes FcRn variants M428L/N434S, wherein numbering is according to EU numbering. In some embodiments, (i) amino acid substitutions K213E/K218D (EU numbering) in the heavy chain constant domain of the third monomer, and the fourth monomer CL is a CLκ that comprises amino acid substitutions D112K/E123K (Kabat numbering), (ii) the first Fc domain includes heterodimerization skew variants L368D/K370S and the second Fc domain includes heterodimerization skew variants S364K/E357Q, (iii) each of the first and second Fc domains includes ablation variants E233P/L234V/L235A/G236_/S267K, (iv) each of the first and second Fc domains includes FcRn variants M428L/N434S, and (v) the first heavy chain constant domain includes pI variants N208D/Q295E/N384D/Q418E/N421D.

[0428] In some embodiments, one of the first binding domain or the second binding domain binds TL1A and the other binding domain binds IL23. Any suitable TL1A binding domain and IL23 domain can be included in subject CrossMab-VH-VL charge-swap 1+1 format antibody, including any of the TL1A binding domains provided herein or a variant thereof (see, e.g., Tables 44, 7-10, 22, 23, 26, 29-34, and 48, and VH sequences in SEQ ID NOS: 1427-1823 and 2316-2330 and VL sequences in SEQ ID NOS: 1824-1923, and VH/VL pairs set forth in SEQ ID NOS: 2331-2363, or see, e.g., Tables 7-10 and 23) and IL23 binding domains provided herein or a variant thereof (see, e.g., Tables 44, 11, 24-26, 29-34, and 49 and the VH sequences in SEQ ID NOS: 1927-2132 and VL sequences in SEQ ID NOS: 2133-2232, and VH/VL pairs set forth in SEQ ID NOS: 2364-2379, or see, e.g., Table 11, or see, e.g., SEQ ID NOS: 90-95 and FIG. 5).

[0429] Exemplary anti-TL1A×anti-IL23 bispecific antibodies in the CrossMab 1+1 format are depicted in Table 31. Exemplary anti-TL1A×anti-IL23 bispecific antibodies in the CrossMab-VH-VL charge-swap 1+1 format are depicted in Table 32. Other exemplary anti-TL1A×anti-IL23 bispecific antibodies in the CrossMab-VH-VL charge-swap 1+1 format are depicted in Table 44. Other exemplary anti-TL1A×anti-IL23 bispecific antibodies in a CrossMab format are depicted in Table 31. In certain embodiments, a bispecific antibody comprises any of the antibodies depicted in Table 44, 32, or 31 or a variant thereof. In some embodiments, an anti-TL1A×anti-IL23 antibody comprises a heavy chain and/or a light chain having 1, 2, 3, 4, 5, 6, 7, 8, 9 or 10 amino acid changes from any of the above heavy chains and light chains. In some embodiments, an anti-TL1A×anti-IL23 antibody comprises a heavy chain and/or a light chain at least 90%, 95%, 97%, 98%, or 99% identical to any of the above heavy chains and light chains. In some embodiments, the amino acid changes are in a constant region but not in a variable region. In some embodiments, the amino acid changes are in a constant region or in a framework region (e.g., FR1, FR2, FR3, or FR4) but not in a CDR. In some embodiments, the changes are amino acid substitutions at one, two, three, or more of the following residues: (a) rare framework residues that differ between the murine antibody framework (i.e., donor antibody framework) and the human antibody framework (i.e., acceptor antibody framework); (b) Vernier zone residues when differing between donor antibody framework and acceptor antibody framework; (c) interchain packing residues at the VH/VL interface that differ between the donor antibody framework and the acceptor antibody framework; (d) canonical residues which differ between the donor antibody framework and the acceptor antibody framework sequences, particularly the framework regions crucial for the definition of the canonical class of the murine antibody CDR loops; (e) residues that are adjacent to a CDR; (g) residues capable of interacting with the antigen; (h) residues capable of interacting with the CDR; and (i) contact residues between the VH domain and the VL domain. In some embodiments, the substitutions are residues that are adjacent to a CDR, residues capable of interacting with the antigen, or residues capable of interacting with the CDR. Regarding the TL1A binding domain, in some embodiments, the VH sequence includes 53Y (i.e., a Y at position 53) and/or 100V (i.e., a V at position 100) as numbered by Kabat.

### 4. 1+1 CLC Format

[0430] One heterodimeric antibody format that finds particular use in subject anti-TL1A×anti-IL23 antibodies provided herein is the “1+1 Common Light Chain” or “1+1 CLC” format, which is depicted in FIG. 1, Panel C. The 1+1 CLC format antibody includes a first monomer that includes a VH1-CH1-hinge-CH2-CH3, wherein VH1 is a first variable heavy domain and CH2-CH3 is a first Fc domain; a second monomer that includes a VH2-CH1-hinge-CH2-CH3, wherein VH2 is a second variable heavy domain and CH2-C3 is a second Fc domain; and a third monomer “common light chain” comprising VL-CL, wherein VL is a common variable light domain and CL is a constant light domain. In such embodiments, the VL pairs with the VH1 to form a first binding domain with a first antigen-binding specificity; and the VL pairs with the VH2 to form a second binding domain with a second antigen-binding specificity. In some embodiments, the 1+1 CLC format antibody is a bivalent antibody.

[0431] In some embodiments, the first and second Fc domains of the 1+1 CLC format are variant Fc domains that include heterodimerization skew variants (e.g., a set of amino acid substitutions as shown in Tables 12-17 and 5). Particularly useful heterodimerization skew variants include S364K/E357Q:L368D/K370S; L368D/K370S:S364K; L368E/K370S:S364K; T411T/E360E/Q362E:D401K; L368D/K370S:S364K/E357L; K370S:S364K/E357Q; T366S/L368A/Y407V:T366W and T366S/L368A/Y407V/Y349C:T366W/S354C (EU numbering). In exemplary embodiments, one of the first or second variant Fc domains includes heterodimerization skew variants L368D/K370S and the other of the first or second variant Fc domains includes heterodimerization skew variants S364K/E357Q, wherein numbering is according to EU numbering. In exemplary embodiments, the first variant Fc domain includes heterodimerization skew variants L368D/K370S and the second variant Fc domain includes heterodimerization skew variants S364K/E357Q, wherein numbering is according to EU numbering.

[0432] In some embodiments, the variant Fe domains include ablation variants (including those shown in Table 1). In some embodiments, each of the first and second variant Fc domains include ablation variants E233P/L234V/L235A/G236_/S267K, wherein numbering is according to EU numbering.

[0433] In some embodiments, the constant domain (CH1-hinge-CH2-CH3) of the first or second monomer includes pI variants (including those shown in Table 20). In exemplary embodiments, the constant domain (CH1-hinge-CH2-CH3) of the first or second monomer includes pI variants N208D/Q295E/N384D/Q418E/N421D, wherein numbering is according to EU numbering.

[0434] In some embodiments, the 1+1 CLC format antibody provided herein includes FcRn variants M428L/N434S, wherein numbering is according to EU numbering.

[0435] In exemplary embodiments, the first variant Fc domain includes heterodimerization skew variants L368D/K370S and the second variant Fc domain includes heterodimerization skew variants S364K/E357Q; each of the first and second variant Fc domains include ablation variants E233P/L234V/L235A/G236_/S267K; and the constant domain (CH1-hinge-CH2-CH3) of the first monomer includes pI variants N208D/Q295E/N384D/Q418E/N421D, wherein numbering is according to EU numbering.

[0436] In some embodiments, the CH1-hinge-CH2-CH3 of the first monomer comprises amino acid variants L368D/K370S/N208D/Q295E/N384D/Q418E/N421D/E233P/L234V/L235A/G236del/S267 K, and the second Fc domain comprises amino acid variants S364K/E357Q/E233P/L234V/L235A/G236del/S267K, wherein numbering is according to EU numbering.

[0437] In some embodiments, the 1+1 CLC format antibody provided herein further includes FcRn variants M428L/N434S, wherein numbering is according to EU numbering.

[0438] In some embodiments, one of the first binding domain or the second binding domain binds TL1A and the other binding domain binds IL23. Any suitable TL1A binding domain and IL23 domain can be included in subject 1+1 CLC format antibody, including any of the TL1A binding domains provided herein or a variant thereof (see, e.g., Tables 44, 7-10, 22, 23, 26, 29-34, and 48, and VH sequences in SEQ ID NOS: 1427-1823 and 2316-2330 and VL sequences in SEQ ID NOS: 1824-1923, and VH/VL pairs set forth in SEQ ID NOS: 2331-2363, or see, e.g., Tables 7-10 and 23) and TL23 binding domains provided herein or a variant thereof (see, e.g., Tables 44, 11, 24-26, 29-34, and 49 and the VH sequences in SEQ ID NOS: 1927-2132 and VL sequences in SEQ ID NOS: 2133-2232, and VH/VL pairs set forth in SEQ ID NOS: 2364-2379, or see, e.g., Table 11, or see, e.g., SEQ ID NOS: 90-95 and FIG. 5).

[0439] Exemplary anti-TL1A×anti-IL23 bispecific antibodies in the 1+1 CLC format are depicted in Table 33. In certain embodiments, a bispecific antibody comprises any of the antibodies depicted in Table 33 or a variant thereof. In some embodiments, an anti-TL1A×anti-IL23 antibody comprises a heavy chain and/or a light chain having 1, 2, 3, 4, 5, 6, 7, 8, 9 or 10 amino acid changes from any of the above heavy chains and light chains. In some embodiments, an anti-TL1A×anti-IL23 antibody comprises a heavy chain and/or a light chain at least 90%, 95%, 97%, 98%, or 99% identical to any of the above heavy chains and light chains. In some embodiments, the amino acid changes are in a constant region but not in a variable region. In some embodiments, the amino acid changes are in a constant region or in a framework region (e.g., FR1, FR2, FR3, or FR4) but not in a CDR. In some embodiments, the changes are amino acid substitutions at one, two, three, or more of the following residues: (a) rare framework residues that differ between the murine antibody framework (i.e., donor antibody framework) and the human antibody framework (i.e., acceptor antibody framework); (b) Vernier zone residues when differing between donor antibody framework and acceptor antibody framework; (c) interchain packing residues at the VH/VL interface that differ between the donor antibody framework and the acceptor antibody framework; (d) canonical residues which differ between the donor antibody framework and the acceptor antibody framework sequences, particularly the framework regions crucial for the definition of the canonical class of the murine antibody CDR loops; (e) residues that are adjacent to a CDR; (g) residues capable of interacting with the antigen; (h) residues capable of interacting with the CDR; and (i) contact residues between the VH domain and the VL domain. In some embodiments, the substitutions are residues that are adjacent to a CDR, residues capable of interacting with the antigen, or residues capable of interacting with the CDR. Regarding the TL1A binding domain, in some embodiments, the VH sequence includes 53Y (i.e., a Y at position 53) and/or 100V (i.e., a V at position 100) as numbered by Kabat.

5. 2+2 mAb-scFv

[0440] One heterodimeric antibody format that finds particular use in the subject bispecific anti-TL1A×anti-IL23 antibodies is the 2+2 mAb-scFv format shown in FIG. 1, Panel O. This antibody format includes four antigen-binding domains: two Fab portions and two scFvs that are attached to the C-terminal of each of the heavy chain monomers. In some embodiments of this format, the Fab portions each bind IL23, and the “extra” scFv domain binds TL1A. That is, this mAb-scFv format is a trivalent antibody.

[0441] In these embodiments, the first monomer comprises, from N- to C-terminal, VH1-CH1-hinge-CH2-CH3-domain linker-scFv, and the second monomer comprises, from N- to C-terminal, VH1-CH1-hinge-CH2-CH3-domain linker-scFv domain, where the scFv domain comprises a second VH (VH2), a second VL (VL2) and a scFv linker. As for all the scFv domains herein, the scFv domains of the 2+2 mAb-scFv can be in either orientation, from N- to C-terminal, VH2-scFv linker-VL2 or VL2-scFv linker-VH2. Accordingly, the first and second monomers may each comprise, from N- to C-terminal, VH1-CH1-hinge-CH2-CH3-domain linker-VH2-scFv linker-VL2 or VH1-CH1-hinge-CH2-CH3-domain linker-VL2-scFv linker-VH2. The composition also comprises a light chain, VL1-CL. In embodiments, this format includes two identical light chains (VL1-CL). In this format, the VH1s are each a first variable heavy (VH) domain, the VL1s are each a first variable light (VL) domain, the VH2 is a second variable heavy domain, and the VL2 is a second variable light domain. In some embodiments, the format includes two identical common light chains (each VL1-CL), wherein each of the common light chains associates with one of the VH1-CH1 of the first and second monomers to form two identical Fabs (i.e., first antigen-binding domains). In some embodiments, the scFvs are the second antigen-binding domains. In some embodiments, the first ABDs bind to human IL23, and the second ABD binds human TL1A.

[0442] In some embodiments, the first and second Fc domains of the 2+2 mAb-scFv format antibody are variant Fc domains that include heterodimerization skew variants (e.g., a set of amino acid substitutions as shown in Tables 12-17 and 5). Particularly useful heterodimerization skew variants include S364K/E357Q:L368D/K370S; L368D/K370S:S364K; L368E/K370S:S364K; T411T/E360E/Q362E:D401K; L368D/K370S:S364K/E357L; K370S:S364K/E357Q; T366S/L368A/Y407V:T366W and T366S/L368A/Y407V/Y349C:T366W/S354C (EU numbering)). In exemplary embodiments, one of the first or second variant Fe domains includes heterodimerization skew variants L368D/K370S and the other of the first or second variant Fc domains includes heterodimerization skew variants S364K/E357Q, wherein numbering is according to EU numbering. In exemplary embodiments, the first variant Fc domain includes heterodimerization skew variants L368D/K370S and the second variant Fc domain includes heterodimerization skew variants S364K/E357Q, wherein numbering is according to EU numbering.

[0443] In some embodiments, the variant Fc domains include ablation variants (including those shown in Table 1). In some embodiments, each of the first and second variant Fc domains include ablation variants E233P/L234V/L235A/G236_/S267K, wherein numbering is according to EU numbering.

[0444] In some embodiments, the constant domain (CH1-hinge-CH2-CH3) of the first monomer includes pI variants (including those shown in Tables 12-17 and 20). In exemplary embodiments, the constant domain (CH1-hinge-CH2-CH3) of the first monomer includes pI variants N208D/Q295E/N384D/Q418E/N421D, wherein numbering is according to EU numbering.

[0445] In some embodiments, the scFv of the 2+2 mAb-scFv format antibody provided herein includes a charged scFv linker (including those shown in Table 4). In some embodiments, the 2+2 mAb-scFv format antibody provided herein includes FcRn variants M428L/N434S, wherein numbering is according to EU numbering.

[0446] In exemplary embodiments the 2+2 mAb-scFv format antibody includes a combination of amino acid modifications as depicted in Table 5. In such embodiments, the first variant Fc domain includes heterodimerization skew variants L368D/K370S and the second variant Fc domain includes heterodimerization skew variants S364K/E357Q; each of the first and second variant Fc domains include ablation variants E233P/L234V/L235A/G236_/S267K; and the constant domain (CH1-hinge-CH2-CH3) of the first monomer includes pI variants N208D/Q295E/N384D/Q418E/N421D, wherein numbering is according to EU numbering. In some embodiments, the scFvs of the 2+2 mAb-scFv format antibody provided herein include a (GKPGS)₄ (SEQ ID NO: 16) charged scFv linker. In some embodiments, 2+2 mAb-scFv format antibody provided herein includes FcRn variants M428L/N434S, wherein numbering is according to EU numbering.

[0447] In some embodiments, the scFvs of the 2+2 mAb-scFv-Fc format antibody are each TL1A binding domains and the VH1 of the first and second monomer and the VL1 of the common light chain each form binding domains that bind IL23. In some embodiments, the scFvs of the 2+2 mAb-scFv-Fc format antibody are each IL23 binding domains and the VH1 of the first and second monomer and the VL1 of the common light chain each form binding domains that bind TL1A.

[0448] Any suitable TL1A binding domain and IL23 domain can be included in subject 2+2 mAb-scFv-Fc format antibody, including any of the TL1A binding domains provided herein or a variant thereof (see, e.g., Tables 44, 7-10, 22, 23, 26, 29-34, and 48, and VH sequences in SEQ ID NOS: 1427-1823 and 2316-2330 and VL sequences in SEQ ID NOS: 1824-1923, and VH/VL pairs set forth in SEQ ID NOS: 2331-2363, or see, e.g., Tables 7-10 and 23) and IL23 binding domains provided herein or a variant thereof (see, e.g., Tables 44, 11, 24-26, 29-34, and 49 and the VH sequences in SEQ ID NOS: 1927-2132 and VL sequences in SEQ ID NOS: 2133-2232, and VH/VL pairs set forth in SEQ ID NOS: 2364-2379, or see, e.g., Table 11, or see, e.g., SEQ ID NOS: 90-95 and FIG. 5).

[0449] Exemplary anti-TL1A×anti-IL23 bispecific antibodies in the 2+2 mAb-scFv-Fc format and other formats are depicted in Table 34. In certain embodiments, a bispecific antibody comprises any of the antibodies depicted in Table 34 or a variant thereof. In some embodiments, an anti-TL1A×anti-IL23 antibody comprises a heavy chain and/or a light chain having 1, 2, 3, 4, 5, 6, 7, 8, 9 or 10 amino acid changes from any of the above heavy chains and light chains. In some embodiments, an anti-TL1A×anti-IL23 antibody comprises a heavy chain and/or a light chain at least 90%, 95%, 97%, 98%, or 99% identical to any of the above heavy chains and light chains. In some embodiments, the amino acid changes are in a constant region but not in a variable region. In some embodiments, the amino acid changes are in a constant region or in a framework region (e.g., FR1, FR2, FR3, or FR4) but not in a CDR. In some embodiments, the changes are amino acid substitutions at one, two, three, or more of the following residues: (a) rare framework residues that differ between the murine antibody framework (i.e., donor antibody framework) and the human antibody framework (i.e., acceptor antibody framework); (b) Vernier zone residues when differing between donor antibody framework and acceptor antibody framework; (c) interchain packing residues at the VH/VL interface that differ between the donor antibody framework and the acceptor antibody framework; (d) canonical residues which differ between the donor antibody framework and the acceptor antibody framework sequences, particularly the framework regions crucial for the definition of the canonical class of the murine antibody CDR loops; (e) residues that are adjacent to a CDR; (g) residues capable of interacting with the antigen; (h) residues capable of interacting with the CDR; and (i) contact residues between the VH domain and the VL domain. In some embodiments, the substitutions are residues that are adjacent to a CDR, residues capable of interacting with the antigen, or residues capable of interacting with the CDR. Regarding the TL1A binding domain, in some embodiments, the VH sequence includes 53Y (i.e., a Y at position 53) and/or 100V (i.e., a V at position 100) as numbered by Kabat.

6. 2+1 mAb-scFv Format

[0450] One heterodimeric antibody format that finds particular use in the subject bispecific anti-TL1A×anti-IL23 antibodies is the 2+1 mAb-scFv format shown in FIG. 1, Panel E. This antibody format includes three antigen-binding domains: two Fab portions and an scFv that is attached to the C-terminal of one of the heavy chains. In some embodiments of this format, the Fab portions each bind IL23, in this case, human IL23 and the “extra” scFv domain binds TL1A. That is, this 2+1 mAb-scFv format is a trivalent antibody.

[0451] In these embodiments, the first chain or monomer comprises, from N- to C-terminal, VH1-CH1-hinge-CH2-CH3, the second monomer comprises, from N- to C-terminal, VH1-CH1-hinge-CH2-CH3-domain linker-scFv domain, where the scFv domain comprises a second VH (VH2), a second VL (VL2) and a scFv linker. As for all the scFv domains herein, the scFv domain can be in either orientation, from N- to C-terminal, VH2-scFv linker-VL2 or VL2-scFv linker-VH2. Accordingly, the second monomer may comprise, from N- to C-terminal, VH1-CH1-hinge-CH2-CH3-domain linker-VH2-scFv linker-VL2 or VH1-CH1-hinge-CH2-CH3-domain linker-VL2-scFv linker-VH2. The composition also comprises a light chain, VL1-CL. In embodiments, this format includes two identical light chains (VL1-CL). In this format, the VH1s are each a first variable heavy (VH) domain, the VL1s are each a first variable light (VL) domain, the VH2 is a second variable heavy domain, and the VL2 is a second variable light domain. In some embodiments, the format includes two identical common light chains (each VL1-CL), wherein each of the common light chains associates with one of the VH1-CH1 of the first and second monomers to form two identical Fabs (i.e., first antigen-binding domains). In some embodiments, the scFv is the second antigen-binding domain. In some embodiments, the first ABDs bind to human IL23, and the second ABD binds human TL1A. In some embodiments, the first ABDs bind to human TL1A, and the second ABD binds human IL23.

[0452] In some embodiments, the first and second Fe domains of the 2+1 mAb-scFv format antibody are variant Fe domains that include heterodimerization skew variants (e.g., a set of amino acid substitutions as shown in Tables 12-17 and 5). Particularly useful heterodimerization skew variants include S364K/E357Q:L368D/K370S; L368D/K370S:S364K; L368E/K370S:S364K; T411T/E360E/Q362E:D401K; L368D/K370S:S364K/E357L; K370S:S364K/E357Q; T366S/L368A/Y407V:T366W and T366S/L368A/Y407V/Y349C:T366W/S354C (EU numbering)). In exemplary embodiments, one of the first or second variant Fc domains includes heterodimerization skew variants L368D/K370S and the other of the first or second variant Fc domains includes heterodimerization skew variants S364K/E357Q, wherein numbering is according to EU numbering. In exemplary embodiments, the first variant Fc domain includes heterodimerization skew variants L368D/K370S and the second variant Fc domain includes heterodimerization skew variants S364K/E357Q, wherein numbering is according to EU numbering.

[0453] In some embodiments, the variant Fc domains include ablation variants (including those shown in Table 1). In some embodiments, each of the first and second variant Fc domains include ablation variants E233P/L234V/L235A/G236_/S267K, wherein numbering is according to EU numbering.

[0454] In some embodiments, the constant domain (CH1-hinge-CH2-CH3) of the first monomer includes pI variants (including those shown in Tables 12-17 and 20). In exemplary embodiments, the constant domain (CH1-hinge-CH2-CH3) of the first monomer includes pI variants N208D/Q295E/N384D/Q418E/N421D, wherein numbering is according to EU numbering.

[0455] In some embodiments, the scFv of the 2+1 mAb-scFv format antibody provided herein includes a charged scFv linker (including those shown in Table 4). In some embodiments, the 2+1 mAb-scFv format antibody provided herein includes FcRn variants M428L/N434S, wherein numbering is according to EU numbering.

[0456] In exemplary embodiments the 2+1 mAb-scFv format antibody includes a combination of amino acid modifications as depicted in Table 5. In such embodiments, the first variant Fc domain includes heterodimerization skew variants L368D/K370S and the second variant Fc domain includes heterodimerization skew variants S364K/E357Q; each of the first and second variant Fc domains include ablation variants E233P/L234V/L235A/G236_/S267K; and the constant domain (CH1-hinge-CH2-CH3) of the first monomer includes pI variants N208D/Q295E/N384D/Q418E/N421D, wherein numbering is according to EU numbering. In some embodiments, the scFv of the 2+1 mAb-scFv format antibody provided herein includes a (GKPGS)₄ (SEQ ID NO: 16) charged scFv linker. In some embodiments, 2+1 mAb-scFv format antibody provided herein includes FcRn variants M428L/N434S, wherein numbering is according to EU numbering.

[0457] In some embodiments, the scFv of the second monomer of the 2+1 mAb-scFv-Fc format antibody is a TL1A binding and the VH1 of the first and second monomer and the VL1 of the common light chain each form binding domains that bind IL23. In some embodiments, one of the first binding domain or the second binding domain binds TL1A and the other binding domain binds IL23. In some embodiments, the scFv of the second monomer of the 2+1 mAb-scFv-Fc format antibody is a IL23 binding and the VH1 of the first and second monomer and the VL1 of the common light chain each form binding domains that bind TL1A.

[0458] Any suitable TL1A binding domain and TL23 domain can be included in subject 2+1 mAb-scFv-Fc format antibody, including any of the TL1A binding domains provided herein or a variant thereof (see, e.g., Tables 44, 7-10, 22, 23, 26, 29-34, and 48, and VH sequences in SEQ ID NOS: 1427-1823 and 2316-2330 and VL sequences in SEQ ID NOS: 1824-1923, and VH/VL pairs set forth in SEQ ID NOS: 2331-2363, or see, e.g., Tables 7-10 and 23) and IL23 binding domains provided herein or a variant thereof (see, e.g., Tables 44, 11, 24-26, 29-34, and 49 and the VH sequences in SEQ ID NOS: 1927-2132 and VL sequences in SEQ ID NOS: 2133-2232, and VH/VL pairs set forth in SEQ ID NOS: 2364-2379, or see, e.g., Table 11, or see, e.g., SEQ ID NOS: 90-95 and FIG. 5).

[0459] Illustrative sequences of heterodimeric anti-TL1A×anti-IL23 bsAb backbone for use in the 2+1 mAb-scFv format are provided in SEQ ID NOS: 88 and 89. The format depicted here is based on heterodimeric Fc backbone 1 set forth in SEQ ID NOS: 58 and 59, except further including G446_on monomer 1 (−) and G446_/K447_on monomer 2 (+). It should be noted that any of the additional backbones in SEQ ID NOS: 58-87 may be adapted for use in the 2+1 mAb-scFv format with or without including K447_on one or both chains. It should be noted that these sequences may further include the M428L/N434S variants. In addition, exemplary CH1-hinge domains, CH1 domains, and hinge domains that can be included in the first or second monomer of the 2+1 mAb-scFv format are provided in SEQ ID NOS: 90-98. Further, useful CL sequences that can be used with this format, i.e., constant domain of the cognate light chains that find use in the subject anti-TL1A×anti-IL23 bsAbs that utilize a Fab binding domain, are provided in SEQ ID NOS: 99 and 100.

7. 2+1 Fab2-scFv-Fc format

[0460] One heterodimeric antibody format that finds particular use in subject anti-TL1A×anti-IL23 antibodies provided herein is the 2+1 Fab₂-scFv-Fc format (also referred to as “central-scFv format”) shown in FIG. 1, Panel B. This antibody format includes three antigen-binding domains: two Fab portions and an scFv that is inserted between the VH-CH1 and CH2-CH3 regions of one of the monomers. In some embodiments of this format, the Fab portions each bind IL23 and the “extra” scFv domain binds TL1A. In some embodiments of this format, the Fab portions each bind TL1A and the “extra” scFv domain binds IL23. In some embodiments, the 2+1 Fab2-scFv-Fc format antibody is a trivalent antibody.

[0461] In some embodiments of the 2+1 Fab₂-scFv-Fc format, a first monomer includes a standard heavy chain (i.e., VH1-CH1-hinge-CH2-CH3), wherein VH1 is a first variable heavy domain and CH2-CH3 is a first Fc domain. A second monomer includes another first variable heavy domain (VH1), a CH1 domain (and optional hinge), a second Fc domain, and an scFv that includes an scFv variable light domain (VL2), an scFv linker and a scFv variable heavy domain (VH2). The scFv is covalently attached between the C-terminus of the CH1 domain of the second monomer and the N-terminus of the second Fc domain using optional domain linkers (VH1-CH1-[optional linker]-VH2-scFv linker-VH2-[optional linker]-CH2-CH3, or the opposite orientation for the scFv, VH1-CH1-[optional linker]-VL2-scFv linker-VH2-[optional linker]-CH2-CH3). The optional linkers can be any suitable peptide linkers, including, for example, the domain linkers included in Table 6. This embodiment further utilizes a common light chain that includes a variable light domain (VL1) and a constant light domain (CL). In some embodiments, the format includes two identical common light chains (each VL1-CL), wherein each of the common light chains associates with one of the VH1-CH1 of the first and second monomers to form two identical Fabs. In some embodiments, the identical Fabs each bind IL23, and the scFv binds TL1A. In some embodiments, the identical Fabs each bind TL1A, and the scFv binds IL23. As for many of the embodiments herein, these constructs can include skew variants, pI variants, ablation variants, additional Fc variants, etc. as desired and described herein.

[0462] In some embodiments, the first and second Fc domains of the 2+1 Fab2-scFv-Fc format antibody are variant Fc domains that include heterodimerization skew variants (e.g., a set of amino acid substitutions as shown in Tables 12-17 and 5). Particularly useful heterodimerization skew variants include S364K/E357Q:L368D/K370S; L368D/K370S:S364K; L368E/K370S:S364K; T411T/E360E/Q362E:D401K; L368D/K370S:S364K/E357L; K370S:S364K/E357Q; T366S/L368A/Y407V:T366W and T366S/L368A/Y407V/Y349C:T366W/S354C (EU numbering)). In exemplary embodiments, one of the first or second variant Fc domains includes heterodimerization skew variants L368D/K370S and the other of the first or second variant Fc domains includes heterodimerization skew variants S364K/E357Q, wherein numbering is according to EU numbering. In exemplary embodiments, the first variant Fc domain includes heterodimerization skew variants L368D/K370S and the second variant Fc domain includes heterodimerization skew variants S364K/E357Q, wherein numbering is according to EU numbering.

[0463] In some embodiments, the variant Fc domains include ablation variants (including those shown in Table 1). In some embodiments, each of the first and second variant Fc domains include ablation variants E233P/L234V/L235A/G236_/S267K, wherein numbering is according to EU numbering.

[0464] In some embodiments, the constant domain (CH1-hinge-CH2-CH3) of the first monomer includes pI variants (including those shown in Tables 12-17 and 20). In exemplary embodiments, the constant domain (CH1-hinge-CH2-CH3) of the first monomer includes pI variants N208D/Q295E/N384D/Q418E/N421D, wherein numbering is according to EU numbering.

[0465] In some embodiments, the scFv of the 2+1 Fab₂-scFv-Fc format antibody provided herein includes a charged scFv linker (including those shown in Table 4). In some embodiments, the 2+1 Fab₂-scFv-Fc format antibody provided herein includes FcRn variants M428L/N434S, wherein numbering is according to EU numbering.

[0466] In exemplary embodiments 2+1 Fab₂-scFv-Fc format antibody includes a combination of amino acid modifications as depicted in Table 5. In such embodiments, the first variant Fc domain includes heterodimerization skew variants L368D/K370S and the second variant Fc domain includes heterodimerization skew variants S364K/E357Q; each of the first and second variant Fc domains include ablation variants E233P/L234V/L235A/G236_/S267K; and the constant domain (CH1-hinge-CH2-CH3) of the first monomer includes pI variants N208D/Q295E/N384D/Q418E/N421D, wherein numbering is according to EU numbering. In some embodiments, the scFv of the 2+1 Fab²-scFv-Fc format antibody provided herein includes a (GKPGS)₄ (SEQ ID NO: 16) charged scFv linker. In some embodiments, the 2+1 Fab₂-scFv-Fc format antibody provided herein includes FcRn variants M428L/N434S, wherein numbering is according to EU numbering.

[0467] In some embodiments, the CH1-hinge-CH2-CH3 of the first monomer comprises amino acid variants L368D/K370S/N208D/Q295E/N384D/Q418E/N421D/E233P/L234V/L235A/G236del/S267 K, and the second Fc domain comprises amino acid variants S364K/E357Q/E233P/L234V/L235A/G236del/S267K, wherein numbering is according to EU numbering.

[0468] In some embodiments, the scFv of the second monomer of the 2+1 Fab₂-scFv-Fc format antibody is a TL1A binding domain and the VH1 of the first and second monomer and the VL1 of the common light chain each form binding domains that bind IL23. In some embodiments, the scFv of the second monomer of the 2+1 Fab₂-scFv-Fc format antibody is a IL23 binding domain and the VH1 of the first and second monomer and the VL1 of the common light chain each form binding domains that bind TL1A.

[0469] Any suitable TL1A binding domain and IL23 domain can be included in an anti-TL1A×anti-IL23 antibody in the 2+1 Fab₂-scFv-Fc format, including any of the TL1A binding domains provided herein or a variant thereof (see, e.g., Tables 44, 7-10, 22, 23, 26, 29-34, and 48, and VH sequences in SEQ ID NOS: 1427-1823 and 2316-2330 and VL sequences in SEQ ID NOS: 1824-1923, and VH/VL pairs set forth in SEQ ID NOS: 2331-2363, or see, e.g., Tables 7-10 and 23) and IL23 binding domains provided herein or a variant thereof (see, e.g., Tables 44, 11, 24-26, 29-34, and 49 and the VH sequences in SEQ ID NOS: 1927-2132 and VL sequences in SEQ ID NOS: 2133-2232, and VH/VL pairs set forth in SEQ ID NOS: 2364-2379, or see, e.g., Table 11, or see, e.g., SEQ ID NOS: 90-95 and FIG. 5).

### 8. 2+1 Fab2-Fc×scFv-Fc Format

[0470] One heterodimeric antibody format that finds particular use in the subject anti-anti-TL1A×anti-IL23 antibodies provided herein is the 2+1 Fab₂-Fc×scFv-Fc format (also referred to as “stacked bottle opener”) shown in FIG. 1, Panel F. This format includes a first monomer, a second monomer and a common light chain. The first monomer includes, from N- to C-terminus: a VH1-CH1-domain linker-VH1-CH1-hinge-CH2-CH3, wherein the VH1s are each a first variable heavy domain and the CH2-CH3 is a first variant Fc domain. The domain linker can be any useful domain linker (see, e.g., Table 6). The second monomer includes a single-chain Fv (“scFv”) covalently attached to a second variant Fc domain by a domain linker (scFv-domain linker-CH2-CH3). The common light chain include a VL1-CL wherein the VL1 is a first variable light domain. The scFv of the second monomer includes a second variable heavy domain (VH2) attached to a second variable light domain (VL2) by an scFv linker. In some embodiments, this format includes two identical common light chains (VL1-CL). In this embodiment, the two VH1-CH1s of the first monomer each interact with a common light chain to form two identical Fabs that are first antigen-binding domains, and the VH2 and VL2 form a second antigen-binding domain. In some embodiments, each of the first antigen-binding domains are IL23 binding domains, and the second antigen-binding domain is a TL1A binding domain. In some embodiments, each of the first antigen-binding domains are TL1A binding domains, and the second antigen-binding domain is an IL23 binding domain. As for many of the embodiments herein, these constructs can include skew variants, pI variants, ablation variants, additional Fc variants, etc. as desired and described herein.

[0471] In some embodiments, the first and second Fc domains of the 2+1 Fab2-Fc×scFv-Fc format antibody are variant Fc domains that include heterodimerization skew variants (e.g., a set of amino acid substitutions as shown in Tables 12-17 and 5). Particularly useful heterodimerization skew variants include S364K/E357Q:L368D/K370S; L368D/K370S:S364K; L368E/K370S:S364K; T411T/E360E/Q362E:D401K; L368D/K370S:S364K/E357L; K370S:S364K/E357Q; T366S/L368A/Y407V:T366W and T366S/L368A/Y407V/Y349C:T366W/S354C (EU numbering)). In exemplary embodiments, one of the first or second variant Fc domains includes heterodimerization skew variants L368D/K370S and the other of the first or second variant Fe domains includes heterodimerization skew variants S364K/E357Q, wherein numbering is according to EU numbering. In exemplary embodiments, the first variant Fc domain includes heterodimerization skew variants L368D/K370S and the second variant Fc domain includes heterodimerization skew variants S364K/E357Q, wherein numbering is according to EU numbering.

[0472] In some embodiments, the variant Fc domains include ablation variants (including those shown in Table 1). In some embodiments, each of the first and second variant Fc domains include ablation variants E233P/L234V/L235A/G236_/S267K, wherein numbering is according to EU numbering.

[0473] In some embodiments, the constant domain (CH1-hinge-CH2-CH3) of the first monomer includes pI variants (including those shown in Tables 12-17 and 20). In exemplary embodiments, the constant domain (CH1-hinge-CH2-CH3) of the first monomer includes pI variants N208D/Q295E/N384D/Q418E/N421D, wherein numbering is according to EU numbering.

[0474] In some embodiments, the 2+1 Fab2-Fc×scFv-Fc format antibody provided herein includes a charged scFv linker (including those shown in Table 4). In some embodiments, the 2+1 Fab2-scFv-Fc format antibody provided herein includes FcRn variants M428L/N434S, wherein numbering is according to EU numbering.

[0475] In exemplary embodiments, the 2+1 Fab2-Fc×scFv-Fc format antibody includes a combination of amino acid modifications as depicted in Table 5. In such embodiments, the first variant Fc domain includes heterodimerization skew variants L368D/K370S and the second variant Fc domain includes heterodimerization skew variants S364K/E357Q; each of the first and second variant Fc domains include ablation variants E233P/L234V/L235A/G236_/S267K; and the constant domain (CH1-hinge-CH2-CH3) of the first monomer includes pI variants N208D/Q295E/N384D/Q418E/N421D, wherein numbering is according to EU numbering. In some embodiments, the scFv of the 2+1 Fab2-scFv-Fc format antibody provided herein includes a (GKPGS)₄ charged scFv linker (SEQ ID NO: 16). In some embodiments, the 2+1 Fab2-scFv-Fc format antibody provided herein includes FcRn variants M428L/N434S, wherein numbering is according to EU numbering.

[0476] In some embodiments, the CH1-hinge-CH2-CH3 of the first monomer comprises amino acid variants L368D/K370S/N208D/Q295E/N384D/Q418E/N421D/E233P/L234V/L235A/G236del/5267 K, and the second Fc domain comprises amino acid variants S364K/E357Q/E233P/L234V/L235A/G236del/S267K, wherein numbering is according to EU numbering.

[0477] In some embodiments, the scFv of the second monomer of the 2+1 Fab2-Fc×scFv-Fc format antibody is a TL1A binding domain and the VH1 of the first and second monomer and the VL1 of the common light chain each form binding domains that bind IL23. In some embodiments, the scFv of the second monomer of the 2+1 Fab2-Fc×scFv-Fc format antibody is an IL23 binding domain and the VH1 of the first and second monomer and the VL1 of the common light chain each form binding domains that bind TL1A.

[0478] Any suitable TL1A binding domain and IL23 domain can be included in an anti-TL1A×anti-IL23 antibody in the 2+1 Fab2-Fc×scFv-Fc format, including any of the TL1A binding domains provided herein or a variant thereof (see, e.g., Tables 44, 7-10, 22, 23, 26, 29-34, and 48, and VH sequences in SEQ ID NOS: 1427-1823 and 2316-2330 and VL sequences in SEQ ID NOS: 1824-1923, and VH/VL pairs set forth in SEQ ID NOS: 2331-2363, or see, e.g., Tables 7-10 and 23) and IL23 binding domains provided herein or a variant thereof (see, e.g., Tables 44, 11, 24-26, 29-34, and 49 and the VH sequences in SEQ ID NOS: 1927-2132 and VL sequences in SEQ ID NOS: 2133-2232, and VH/VL pairs set forth in SEQ ID NOS: 2364-2379, or see, e.g., Table 11, or see, e.g., SEQ ID NOS: 90-95 and FIG. 5).

[0479] Exemplary Fc domain sequences (described in section G.1.) that are useful in 2+1 Fab2-Fc×scFv-Fc format antibodies are provided in SEQ ID NOS: 58-87. In addition, exemplary CH1-hinge domains, CH1 domains, and hinge domains that can be included in the first or second monomer of the 2+1 Fab2-Fc×scFv-Fc format are provided in SEQ ID NOS: 90-98. Further, useful CL sequences that can be used with this format, i.e., constant domain of the cognate light chains that find use in the subject anti-TL1A×anti-IL23 bsAbs that utilize a Fab binding domain, are provided in SEQ ID NOS: 99 and 100.

### 9. 2+1 CLC Format

[0480] Another heterodimeric antibody format that finds particular use in subject anti-TL1A×anti-IL23 antibodies provided herein is the “2+1 Common Light Chain” or “2+1 CLC” format, which is depicted in FIG. 1, Panel D. The 2+1 CLC format includes a first monomer that includes a VH1-CH1-linker-VH1-CH1-hinge-CH2-CH3, wherein the VH1s are each a first variable heavy domain and CH2-CH3 is a first Fc domain; a second monomer that includes a VH2-CH1-hinge-CH2-CH3, wherein VH2 is a second variable heavy domain and CH2-CH3 is a second Fc domain; and a third monomer that includes a “common light chain” VL-CL, wherein VL is a common variable light domain and CL is a constant light domain. The VL pairs with each of the VH1s of the first monomer to form two first binding domains, each with a first antigen-binding specificity; and the VL pairs with the VH2 to form a second binding domain with a second antigen-binding specificity. The linker of the first monomer can be any suitable linker, including any one of the domain linkers or combinations thereof described in Table 6. In some embodiments, the 2+1 CLC format antibody is a trivalent antibody.

[0481] In some embodiments, the first and second Fc domains of the 2+1 CLC format are variant Fc domains that include heterodimerization skew variants (e.g., a set of amino acid substitutions as shown in Tables 12-17 and 5). Particularly useful heterodimerization skew variants include S364K/E357Q:L368D/K370S; L368D/K370S:S364K; L368E/K370S:S364K; T411T/E360E/Q362E:D401K; L368D/K370S:S364K/E357L; K370S:S364K/E357Q; T366S/L368A/Y407V:T366W and T366S/L368A/Y407V/Y349C:T366W/S354C (EU numbering)). In exemplary embodiments, one of the first or second variant Fc domains includes heterodimerization skew variants L368D/K370S and the other of the first or second variant Fc domains includes heterodimerization skew variants S364K/E357Q, wherein numbering is according to EU numbering. In exemplary embodiments, the first variant Fc domain includes heterodimerization skew variants L368D/K370S and the second variant Fc domain includes heterodimerization skew variants S364K/E357Q, wherein numbering is according to EU numbering.

[0482] In some embodiments, the variant Fc domains include ablation variants (including those shown in Table 1). In some embodiments, each of the first and second variant Fc domains include ablation variants E233P/L234V/L235A/G236_/S267K, wherein numbering is according to EU numbering.

[0483] In some embodiments, the constant domain (CH1-hinge-CH2-CH3) of the first or second monomer includes pI variants (including those shown in Table 20). In exemplary embodiments, the constant domain (CH1-hinge-CH2-CH3) of the first or second monomer includes pI variants N208D/Q295E/N384D/Q418E/N421D, wherein numbering is according to EU numbering.

[0484] In some embodiments, the 2+1 CLC format antibody provided herein further includes FcRn variants M428L/N434S, wherein numbering is according to EU numbering.

[0485] In exemplary embodiments, the first variant Fc domain includes heterodimerization skew variants L368D/K370S and the second variant Fc domain includes heterodimerization skew variants S364K/E357Q; each of the first and second variant Fc domains include ablation variants E233P/L234V/L235A/G236_/S267K; and the constant domain (CH1-hinge-CH2-CH3) of the first monomer includes pI variants N208D/Q295E/N384D/Q418E/N421D, wherein numbering is according to EU numbering. In some embodiments, the 2+1 CLC format antibody provided herein further includes FcRn variants M428L/N434S, wherein numbering is according to EU numbering.

[0486] In some embodiments, the CH1-hinge-CH2-CH3 of the second monomer comprises amino acid variants L368D/K370S/N208D/Q295E/N384D/Q418E/N421D/E233P/L234V/L235A/G236del/S267 K, and the first Fc domain comprises amino acid variants S364K/E357Q/E233P/L234V/L235A/G236del/S267K, wherein numbering is according to EU numbering.

[0487] In some embodiments, each of the two first binding domains binds IL23 and the second binding domain binds TL1A. In some embodiments, each of the two first binding domains binds TL1A and the second binding domain binds IL23. Any suitable TL1A binding domain and IL23 domain can be included in an anti-TL1A×anti-IL23 antibody in the 2+1 CLC format, including any of the TL1A binding domains provided herein or a variant thereof (see, e.g., Tables 44, 7-10, 22, 23, 26, 29-34, and 48, and VH sequences in SEQ ID NOS: 1427-1823 and 2316-2330 and VL sequences in SEQ ID NOS: 1824-1923, and VH/VL pairs set forth in SEQ ID NOS: 2331-2363, or see, e.g., Tables 7-10 and 23) and IL23 binding domains provided herein or a variant thereof (see, e.g., Tables 44, 11, 24-26, 29-34, and 49 and the VH sequences in SEQ ID NOS: 1927-2132 and VL sequences in SEQ ID NOS: 2133-2232, and VH/VL pairs set forth in SEQ ID NOS: 2364-2379, or see, e.g., Table 11, or see, e.g., SEQ ID NOS: 90-95 and FIG. 5).

10. Dual scFv Formats

[0488] One heterodimeric antibody format that finds particular use in the subject bispecific anti-TL1A×anti-IL23 antibodies is the dual scFv format, as shown in FIG. 1, Panel G. In this embodiment, the heterodimeric bispecific antibody is made up of two scFv-Fc monomers (both in either (vh-scFv linker-vl-[optional domain linker]-CH2-CH3) format or (vl-scFv linker-vh-[optional domain linker]-CH2-CH3) format, or with one monomer in one orientation and the other in the other orientation. All ABDs are in the scFv format in a dual scFv format antibody.

[0489] In addition, the Fc domains of the dual scFv format comprise skew variants (e.g. a set of amino acid substitutions as shown in Tables 12-17 and 5, with particularly useful skew variants being selected from the group consisting of S364K/E357Q:L368D/K370S; L368D/K370S:S364K; L368E/K370S:S364K; T411T/E360E/Q362E:D401K; L368D/K370S:S364K/E357L, K370S:S364K/E357Q, T366S/L368A/Y407V:T366W and T366S/L368A/Y407V/Y349C:T366W/S354C), optionally ablation variants (including those shown in Table 1), optionally charged scFv linkers (including those shown in Table 4) and the heavy chain comprises pI variants (including those shown in Table 20).

[0490] In some embodiments, the dual scFv format includes skew variants, pI variants, and ablation variants. Accordingly, some embodiments include formats that comprise: a) a first monomer that comprises the skew variants S364K/E357Q, the ablation variants E233P/L234V/L235A/G236del/S267K, and a scFv that binds a first antigen (VH1-scFv linker-VL1-[optional domain linker]-CH2-CH3 or VL1-scFv linker-VH1-[optional domain linker]-CH2-CH3) and b) a first monomer that comprises the skew variants L368D/K370S, the ablation variants E233P/L234V/L235A/G236del/S267K, and a scFv that binds a second antigen (VH1-scFv linker-VL1-[optional domain linker]-CH2-CH3 or VL1-scFv linker-VH1-[optional domain linker]-CH2-CH3). pI variants can be as outlined herein, but most common will be charged scFv linkers of opposite charge for each monomer. FcRn variants, particularly 428L/434S, can optionally be included.

[0491] Any suitable TL1A binding domain and IL23 domain can be included in an anti-TL1A×anti-IL23 antibody in the dual scFv format, including any of the TL1A binding domains provided herein or a variant thereof (see, e.g., Tables 44, 7-10, 22, 23, 26, 29-34, and 48, and VH sequences in SEQ ID NOS: 1427-1823 and 2316-2330 and VL sequences in SEQ ID NOS: 1824-1923, and VH/VL pairs set forth in SEQ ID NOS: 2331-2363, or see, e.g., Tables 7-10 and 23) and TL23 binding domains provided herein or a variant thereof (see, e.g., Tables 44, 11, 24-26, 29-34, and 49 and the VH sequences in SEQ ID NOS: 1927-2132 and VL sequences in SEQ ID NOS: 2133-2232, and VH/VL pairs set forth in SEQ ID NOS: 2364-2379, or see, e.g., Table 11, or see, e.g., SEQ ID NOS: 90-95 and FIG. 5).

### 11. One-Armed Central-scFv

[0492] One heterodimeric antibody format that finds particular use in subject anti-TL1A×anti-IL23 antibodies provided herein is the one-armed central-scFv format shown in FIG. 1, Panel K. In this embodiment, one monomer comprises just an Fc domain, while the other monomer includes a Fab domain (a first antigen-binding domain), a scFv domain (a second antigen-binding domain) and an Fc domain, where the scFv domain is inserted between the Fc domain and the Fc domain.

[0493] In this embodiment, one monomer comprises a first heavy chain comprising a first variable heavy domain, a CH1 domain and Fc domain, with a scFv comprising a scFv variable light domain, an scFv linker and a scFv variable heavy domain. The scFv is covalently attached between the C-terminus of the CH1 domain of the heavy constant domain and the N-terminus of the first Fc domain using domain linkers, in either orientation, VH1-CH1-[optional domain linker]-VH2-scFv linker-VL2-[optional domain linker]-CH2-CH3 or VH1-CH1-[optional domain linker]-VL2-scFv linker-VH2-[optional domain linker]-CH2-CH3. The second monomer comprises an Fc domain (CH2-CH3). This embodiment further utilizes a light chain, comprising a variable light domain and a constant light domain, that associates with the heavy chain to form a Fab. As for many of the embodiments herein, these constructs include skew variants, pI variants, ablation variants, additional Fc variants, etc. as desired and described herein.

[0494] Any suitable TL1A binding domain and IL23 domain can be included in an anti-TL1A×anti-IL23 antibody in the one-armed central-scFv format, including any of the TL1A binding domains provided herein or a variant thereof (see, e.g., Tables 44, 7-10, 22, 23, 26, 29-34, and 48, and VH sequences in SEQ ID NOS: 1427-1823 and 2316-2330 and VL sequences in SEQ ID NOS: 1824-1923, and VH/VL pairs set forth in SEQ ID NOS: 2331-2363, or see, e.g., Tables 7-10 and 23) and IL23 binding domains provided herein or a variant thereof (see, e.g., Tables 44, 11, 24-26, 29-34, and 49 and the VH sequences in SEQ ID NOS: 1927-2132 and VL sequences in SEQ ID NOS: 2133-2232, and VH/VL pairs set forth in SEQ ID NOS: 2364-2379, or see, e.g., Table 11, or see, e.g., SEQ ID NOS: 90-95 and FIG. 5).

12. One-Armed scFv-mAb Format

[0495] One heterodimeric antibody format that finds particular use in subject anti-TL1A×anti-IL23 antibodies provided herein is the one-armed mAb-scFv format shown in FIG. 1, Panel H. This format includes: 1) a first monomer that comprises an “empty” Fc domain; 2) a second monomer that includes a first variable heavy domain (VH), a scFv domain (a second antigen-binding domain) and an Fc domain, where the scFv domain is attached to the N-terminus of the first variable heavy domain; and 3) a light chain that includes a first variable light domain and a constant light domain. The first variable heavy domain and the first variable light domain form a first antigen-binding domain and the scFv is a second antigen-binding domain. In this format, one of the first antigen-binding domain and second binding domain binds TL1A, and the other antigen-binding domain binds IL23. As for many of the embodiments herein, these constructs include skew variants, pI variants, ablation variants, additional Fc variants, etc. as desired and described herein.

[0496] Any suitable TL1A binding domain and IL23 domain can be included in an anti-TL1A×anti-IL23 antibody in the one-armed scFv-mAb format, including any of the TL1A binding domains provided herein or a variant thereof (see, e.g., Tables 44, 7-10, 22, 23, 26, 29-34, and 48, and VH sequences in SEQ ID NOS: 1427-1823 and 2316-2330 and VL sequences in SEQ ID NOS: 1824-1923, and VH/VL pairs set forth in SEQ ID NOS: 2331-2363, or see, e.g., Tables 7-10 and 23) and IL23 binding domains provided herein or a variant thereof (see, e.g., Tables 44, 11, 24-26, 29-34, and 49 and the VH sequences in SEQ ID NOS: 1927-2132 and VL sequences in SEQ ID NOS: 2133-2232, and VH/VL pairs set forth in SEQ ID NOS: 2364-2379, or see, e.g., Table 11, or see, e.g., SEQ ID NOS: 90-95 and FIG. 5).

13. scFv-mAb Format

[0497] One heterodimeric antibody format that finds particular use in subject anti-TL1A×anti-IL23 antibodies provided herein is the mAb-scFv format shown in FIG. 1, Panel I. In this embodiment, the format relies on the use of a N-terminal attachment of a scFv to one of the monomers, thus forming a third antigen-binding domain, wherein the Fab portions of the two monomers each bind one target and the “extra” scFv domain binds a different target.

[0498] In this embodiment, the first monomer comprises a first heavy chain (comprising a variable heavy domain and a constant domain), with a N-terminally covalently attached scFv comprising a scFv variable light domain, an scFv linker and a scFv variable heavy domain in either orientation ((vh1-scFv linker-vl1-[optional domain linker]-vh2-CH1-hinge-CH2-CH3) or (with the scFv in the opposite orientation) ((vl1-scFv linker-vh1-[optional domain linker]-vh2-CH1-hinge-CH2-CH3)). The second monomer comprises a heavy chain VH2-CH1-hinge-CH2-CH3. This embodiment further utilizes a common light chain, comprising a variable light domain and a constant light domain, that associates with the heavy chains to form two identical Fabs. As for many of the embodiments herein, these constructs include skew variants, pI variants, ablation variants, additional Fc variants, etc. as desired and described herein.

[0499] Any suitable TL1A binding domain and IL23 domain can be included in an anti-TL1A×anti-IL23 antibody in the scFv-mAb format, including any of the TL1A binding domains provided herein or a variant thereof (see, e.g., Tables 44, 7-10, 22, 23, 26, 29-34, and 48, and VH sequences in SEQ ID NOS: 1427-1823 and 2316-2330 and VL sequences in SEQ ID NOS: 1824-1923, and VH/VL pairs set forth in SEQ ID NOS: 2331-2363, or see, e.g., Tables 7-10 and 23) and IL23 binding domains provided herein or a variant thereof (see, e.g., Tables 44, 11, 24-26, 29-34, and 49 and the VH sequences in SEQ ID NOS: 1927-2132 and VL sequences in SEQ ID NOS: 2133-2232, and VH/VL pairs set forth in SEQ ID NOS: 2364-2379, or see, e.g., Table 11, or see, e.g., SEQ ID NOS: 90-95 and FIG. 5).

14. mAb-Fv Format

[0500] One heterodimeric antibody format that finds particular use in subject anti-TL1A×anti-IL23 antibodies provided herein is the mAb-Fv format (FIG. 1, Panel L). In this embodiment, the format relies on the use of a C-terminal attachment of an “extra” variable heavy domain to one monomer and the C-terminal attachment of an “extra” variable light domain to the other monomer, thus forming a third antigen-binding domain (i.e. an “extra” Fv domain), wherein the Fab portions of the two monomers bind one antigen (TL1A or IL23) and the “extra” Fv domain binds the other antigen (TL1A or IL23).

[0501] In this embodiment, the first monomer comprises a first heavy chain, comprising a first variable heavy domain and a first constant heavy domain comprising a first Fc domain, with a first variable light domain covalently attached to the C-terminus of the first Fc domain using a domain linker (vh1-CH1-hinge-CH2-CH3-[optional linker]-vl2). The second monomer comprises a second variable heavy domain, a second constant heavy domain comprising a second Fc domain, and a third variable heavy domain covalently attached to the C-terminus of the second Fc domain using a domain linker (vh1-CH1-hinge-CH2-CH3-[optional linker]-vh2. This embodiment further utilizes a common light chain comprising a variable light domain and a constant light domain, which associates with the heavy chains to form two identical Fabs that include two identical Fvs. The two C-terminally attached variable domains make up the “extra” third Fv. As for many of the embodiments herein, these constructs include skew variants, pI variants, ablation variants, additional Fc variants, etc. as desired and described herein.

[0502] Any suitable TL1A binding domain and IL23 domain can be included in an anti-TL1A×anti-IL23 antibody in the mAb-Fv format, including any of the TL1A binding domains provided herein or a variant thereof (see, e.g., Tables 44, 7-10, 22, 23, 26, 29-34, and 48, and VH sequences in SEQ ID NOS: 1427-1823 and 2316-2330 and VL sequences in SEQ ID NOS: 1824-1923, and VH/VL pairs set forth in SEQ ID NOS: 2331-2363, or see, e.g., Tables 7-10 and 23) and TL23 binding domains provided herein or a variant thereof (see, e.g., Tables 44, 11, 24-26, 29-34, and 49 and the VH sequences in SEQ ID NOS: 1927-2132 and VL sequences in SEQ ID NOS: 2133-2232, and VH/VL pairs set forth in SEQ ID NOS: 2364-2379, or see, e.g., Table 11, or see, e.g., SEQ ID NOS: 90-95 and FIG. 5).

### 15. Central-Fv Format

[0503] One heterodimeric antibody format that finds particular use in subject anti-TL1A×anti-IL23 antibodies provided herein is the central-Fv format shown in FIG. 1, Panel M. In this embodiment, the format relies on the use of an inserted Fv domain thus forming an “extra” third antigen-binding domain, wherein the Fab portions of the two monomers bind one antigen (TL1A or IL23) and the “extra” central-Fv domain binds the other antigen (TL1A or IL23). The Fv domain is inserted between the Fc domain and the CH1-Fv region of the monomers, thus providing a third antigen-binding domain, wherein each monomer contains a component of the Fv (e.g., one monomer comprises a variable heavy domain and the other a variable light domain of the “extra” central Fv domain).

[0504] In this embodiment, one monomer comprises a first heavy chain comprising a first variable heavy domain, a CH1 domain, and Fc domain and an additional variable light domain. The additional variable light domain is covalently attached between the C-terminus of the CH1 domain of the heavy constant domain and the N-terminus of the first Fc domain using domain linkers (vh1-CH1-[optional linker]-vl2-hinge-CH2-CH3). The other monomer comprises a first heavy chain comprising a first variable heavy domain, a CH1 domain and Fc domain and an additional variable heavy domain (vh1-CH1-[optional linker]-vh2-hinge-CH2-CH3). The additional variable heavy domain is covalently attached between the C-terminus of the CH1 domain of the heavy constant domain and the N-terminus of the first Fc domain using domain linkers. This embodiment utilizes a common light chain, comprising a variable light domain and a constant light domain, that associates with the heavy chains to form two identical Fabs that each bind one antigen (TL1A or IL23). The additional variable heavy domain and additional variable light domain form an “extra” central Fv that binds the other antigen (TL1A or IL23). As for many of the embodiments herein, these constructs include skew variants, pI variants, ablation variants, additional Fc variants, etc. as desired and described herein.

[0505] Any suitable TL1A binding domain and IL23 domain can be included in an anti-TL1A×anti-IL23 antibody in the central-Fv format, including any of the TL1A binding domains provided herein or a variant thereof (see, e.g., Tables 44, 7-10, 22, 23, 26, 29-34, and 48, and VH sequences in SEQ ID NOS: 1427-1823 and 2316-2330 and VL sequences in SEQ ID NOS: 1824-1923, and VH/VL pairs set forth in SEQ ID NOS: 2331-2363, or see, e.g., Tables 7-10 and 23) and IL23 binding domains provided herein or a variant thereof (see, e.g., Tables 44, 11, 24-26, 29-34, and 49 and the VH sequences in SEQ ID NOS: 1927-2132 and VL sequences in SEQ ID NOS: 2133-2232, and VH/VL pairs set forth in SEQ ID NOS: 2364-2379, or see, e.g., Table 11, or see, e.g., SEQ ID NOS: 90-95 and FIG. 5).

### 16. Non-Heterodimeric Bispecific Antibodies

[0506] The anti-TL1A×anti-IL23 antibodies provided herein can also be included in non-heterodimeric bispecific formats (see FIG. 1, Panel J). In this format, the anti-TL1A×anti-IL23 includes: 1) a first monomer comprising a VH1-CH1-hinge-CH2-CH3; 2) a second monomer comprising a VH2-CH1-hinge-CH2-CH3; 3) a first light chain comprising a VL1-CL; and 4) a second light chain comprising a VL2-CL. In such embodiments, the VH1 and VL1 form a first antigen-binding domain and VH2 and VL2 form a second antigen-binding domain. One of the first or second antigen-binding domains binds TL1A and the other antigen-binding domain binds IL23.

[0507] Any suitable TL1A binding domain and IL23 domain can be included in an anti-TL1A×anti-IL23 antibody in the non-heterodimeric bispecific antibody format, including any of the TL1A binding domains provided herein or a variant thereof (see, e.g., Tables 44, 7-10, 22, 23, 26, 29-34, and 48, and VH sequences in SEQ ID NOS: 1427-1823 and 2316-2330 and VL sequences in SEQ ID NOS: 1824-1923, and VH/VL pairs set forth in SEQ ID NOS: 2331-2363, or see, e.g., Tables 7-10 and 23) and TL23 binding domains provided herein or a variant thereof (see, e.g., Tables 44, 11, 24-26, 29-34, and 49 and the VH sequences in SEQ ID NOS: 1927-2132 and VL sequences in SEQ ID NOS: 2133-2232, and VH/VL pairs set forth in SEQ ID NOS: 2364-2379, or see, e.g., Table 11, or see, e.g., SEQ ID NOS: 90-95 and FIG. 5).

### 17. Trident Format

[0508] In some embodiments, the anti-TL1A×anti-TL23 antibodies provided herein are in the “Trident” format as generally described in WO2015/184203, hereby expressly incorporated by reference in its entirety and in particular for the Figures, Legends, definitions and sequences of “Heterodimer-Promoting Domains” or “HPDs”, including “K-coil” and “E-coil” sequences. Tridents rely on using two different HPDs that associate to form a heterodimeric structure as a component of the structure, see FIG. 1, Panel N. In this embodiment, the Trident format include a “traditional” heavy and light chain (e.g., VH1-CH1-hinge-CH2-CH3 and VL1-CL), a third chain comprising a first “diabody-type binding domain” or “DART®”, VH2-(linker)-VL3-HPD1 and a fourth chain comprising a second DART®, VH3-(linker)-(linker)-VL2-HPD2. The VH1 and VL1 form a first ABD, the VH2 and VL2 form a second ABD, and the VH3 and VL3 form a third ABD. In some cases, as is shown in FIG. 1, Panel P, the second and third ABDs bind the same antigen.

[0509] Any suitable TL1A binding domain and IL23 domain can be included in an anti-TL1A×anti-IL23 antibody in the trident format, including any of the TL1A binding domains provided herein or a variant thereof (see, e.g., Tables 44, 7-10, 22, 23, 26, 29-34, and 48, and VH sequences in SEQ ID NOS: 1427-1823 and 2316-2330 and VL sequences in SEQ ID NOS: 1824-1923, and VH/VL pairs set forth in SEQ ID NOS: 2331-2363, or see, e.g., Tables 7-10 and 23) and TL23 binding domains provided herein or a variant thereof (see, e.g., Tables 44, 11, 24-26, 29-34, and 49 and the VH sequences in SEQ ID NOS: 1927-2132 and VL sequences in SEQ ID NOS: 2133-2232, and VH/VL pairs set forth in SEQ ID NOS: 2364-2379, or see, e.g., Table 11, or see, e.g., SEQ ID NOS: 90-95 and FIG. 5).

### V. Nucleic Acids and Methods of Making Antibodies

[0510] In another aspect, provided herein are nucleic acid compositions encoding the anti-TL1A antibodies, the anti-IL23 antibodies, or the anti-TL1A×anti-TL23 antibodies provided herein, or nucleic acid compositions encoding any monomer or chain of the anti-TL1A antibodies, the anti-TL23 antibodies, or the anti-TL1A×anti-TL23 antibodies provided herein individually (e.g., a nucleic acid encoding a light chain, a nucleic acid encoding a heavy chain, a nucleic acid encoding a variable light domain, or a nucleic acid encoding a variable heavy domain). A nucleic acid composition may refer to one or multiple polynucleotides.

[0511] For heterodimeric antibodies, the nucleic acid compositions will depend on the format and scaffold of the heterodimeric antibody. Thus, for example, when the format requires three amino acid sequences, such as for the 1+1 Fab-scFv-Fc, 2+1 mAb-scFv, 2+1 Fab2-scFv-Fc, and 2+1 Fab2-Fc×scFv-Fc formats, three polynucleotides can be incorporated into one or more expression vectors for expression. In exemplary embodiments, each polynucleotide is incorporated into a different expression vector.

[0512] The nucleic acids encoding the components of the binding domains and antibodies disclosed herein can be incorporated into expression vectors, and depending on the host cells used to produce the heterodimeric antibodies of the invention. Generally, the nucleic acids are operably linked to any number of regulatory elements (promoters, origin of replication, selectable markers, ribosomal binding sites, inducers, etc.). The expression vectors can be extra-chromosomal or integrating vectors.

[0513] The polynucleotides and/or expression vectors of the invention are then transformed into any number of different types of host cells, including mammalian, bacterial, yeast, insect and/or fungal cells, with mammalian cells (e.g., CHO cells), finding use in many embodiments. Host cells comprising the polynucleotides and/or expression vectors can then be cultured under conditions wherein the antibody is expressed, and the antibody can be recovered (e.g., from the cells or the cell culture medium. For example, the cells can secrete the antibody into cell culture medium, and the antibody can be recovered from the cell culture medium. Such methods can further comprise purifying the antibody.

[0514] In some embodiments, polynucleotides encoding each monomer of the antibody (e.g., heterodimeric bispecific antibody) are each contained within a single expression vector, generally under different or the same promoter controls. In embodiments of particular use in the present invention, each of these polynucleotides are contained on different expression vectors. As shown herein and in U.S. 62/025,931, hereby incorporated by reference, different vector ratios can be used to drive heterodimer formation. That is, surprisingly, while the proteins comprise first monomer: second monomer:light chains (in the case of many of the embodiments herein that have three polypeptides comprising the heterodimeric antibody) in a 1:1:2 ratio, these are not the ratios that give the best results.

[0515] The antibodies provided herein are made by culturing host cells comprising the expression vector(s). Once produced, traditional antibody purification steps are done, including an ion exchange chromatography step. As discussed herein, having the pIs of the two monomers differ by at least 0.5 can allow separation by ion exchange chromatography or isoelectric focusing, or other methods sensitive to isoelectric point. That is, the inclusion of pI substitutions that alter the isoelectric point (pI) of each monomer so that such that each monomer has a different pI and the heterodimer also has a distinct pI, thus facilitating isoelectric purification of the “1+1 Fab-scFv-Fc” heterodimer (e.g., anionic exchange columns, cationic exchange columns). These substitutions also aid in the determination and monitoring of any contaminating dual scFv-Fc and mAb homodimers post-purification (e.g., IEF gels, cIEF, and analytical IEX columns).

### VI. Biological and Biochemical Functionality of the Anti-TL1A Antibodies, the Anti-IL23 Antibodies, and the Anti-TL1A×Anti-IL23 Antibodies

[0516] Generally, the anti-TL1A antibodies described herein can be administered to subjects with a TL1A-associated disease, the anti-IL23 antibodies described herein can be administered to subjects with an IL23-associated disease, and the anti-TL1A×anti-IL23 antibodies described herein or the combinations of the anti-TL1A and anti-IL23 antibodies described herein can be administered to subjects with a TL1A- and/or IL-23 associated disease, and efficacy can be assessed in a number of ways as described herein. For example, the efficacy of the anti-TL1A antibodies, anti-IL23 antibodies, and/or anti-TL1A×anti-IL23 antibodies described herein to block, inhibit, attenuate, or reduce TL1A and/or IL23-mediated signaling can be assessed using a luciferase reporter system, as described elsewhere herein. Likewise, the efficacy of the anti-TL1A antibodies, anti-IL23 antibodies, and/or anti-TL1A×anti-IL23 antibodies described herein to block, inhibit, attenuate, or reduce TL1A and/or IL23 protein levels in circulation and/or diseased tissues can be evaluated by such assays as ELISA and/or immunohistochemistry.

[0517] Disclosed herein are antibodies that bind human TL1A with high affinity, antibodies that bind human IL23 (human IL23p19) with high affinity, and antibodies that bind human TL1A and human IL23 (human IL23p19) with high affinity.

[0518] In some embodiments, an antibody disclosed herein specifically binds human TL1A with a K_{D} of less than about 2E-10 M, less than about 9E-11 M, less than about 8E-11 M, or less than about 7E-11 M as measured by surface plasmon resonance or Biacore at 25° C. (as described in the examples). In some embodiments, an antibody disclosed herein specifically binds human TL1A with a K_{D} of less than about 6.5E-11 M, less than about 6.4 E-11 M, or less than about 6.3E-11 M as measured by surface plasmon resonance or Biacore at 25° C. In some embodiments, an antibody disclosed herein specifically binds human TL1A with a K_{D} of less than about 4.5E-11 M, less than about 4.4 E-11 M, or less than about 4.3E-11 M as measured by surface plasmon resonance or Biacore at 25° C. In some embodiments, an antibody disclosed herein specifically binds human TL1A with a K_{D} of less than about 3E-11 M, less than about 2.9E-11 M, less than about 2.8E-11 M, or less than about 2.7E-11 M as measured by surface plasmon resonance or Biacore at 25° C. In some embodiments, an antibody disclosed herein specifically binds human TL1A with a K_{D} of less than about 3E-11 M as measured by surface plasmon resonance or Biacore at 25° C. In some embodiments, an antibody disclosed herein specifically binds human TL1A with a K_{D} of less than about 2.9E-11 M as measured by surface plasmon resonance or Biacore at 25° C. In some embodiments, an antibody disclosed herein specifically binds human TL1A with a K_{D} of less than about 2.8E-11 M as measured by surface plasmon resonance or Biacore at 25° C. In some embodiments, an antibody disclosed herein specifically binds human TL1A with a K_{D} of less than about 2.7E-11 M as measured by surface plasmon resonance or Biacore at 25° C. In some embodiments, an antibody disclosed herein specifically binds human TL1A with a K_{D} of between about 2E-11 M and about 7E-11M, between about 2.5E-11 M and about 7E-11 M, or between about 2.5E-11 M and about 6.5E-11 M as measured by surface plasmon resonance or Biacore at 25° C. In some embodiments, an antibody disclosed herein specifically binds human TL1A with a K_{D} of between about 4E-11 M and about 6.5E-11 M as measured by surface plasmon resonance or Biacore at 25° C. In some embodiments, an antibody disclosed herein specifically binds human TL1A with a K_{D} of between about 2.5E-11 M and about 4.5E-11 M as measured by surface plasmon resonance or Biacore at 25° C. In some embodiments, an antibody disclosed herein specifically binds human TL1A with a K_{D} of between about 2E-11 M and about 3E-11 M as measured by surface plasmon resonance or Biacore at 25° C. In some embodiments, an antibody disclosed herein specifically binds human TL1A with a K_{D} of between about 4E-11 M and about 5E-11 M as measured by surface plasmon resonance or Biacore at 25° C. In some embodiments, an antibody disclosed herein specifically binds human TL1A with a K_{D} of between about 6E-11 M and about 7E-11 M as measured by surface plasmon resonance or Biacore at 25° C. In some embodiments, an antibody disclosed herein specifically binds human TL1A with a K_{D} of between about 2.5E-11 M and about 3E-11 M as measured by surface plasmon resonance or Biacore at 25° C. In some embodiments, an antibody disclosed herein specifically binds human TL1A with a K_{D} of between about 2.5E-11 M and about 3.5E-11 M as measured by surface plasmon resonance or Biacore at 25° C. In some embodiments, an antibody disclosed herein specifically binds human TL1A with a K_{D} of between about 2.5E-11 M and about 2.7E-11 M as measured by surface plasmon resonance or Biacore at 25° C.

[0519] In some embodiments, an antibody disclosed herein specifically binds human IL23 with a K_{D} of less than about 1.1E-10 M as measured by surface plasmon resonance or Biacore at 25° C. (as described in the examples). In some embodiments, an antibody disclosed herein specifically binds human IL23 with a K_{D} of less than about 7.5E-11 M, less than about 7.4E-11 M, less than about 7E-11 M, less than about 6.5E-11 M, or less than about 6E-11 M as measured by surface plasmon resonance or Biacore at 25° C. In some embodiments, an antibody disclosed herein specifically binds human IL23 with a K_{D} of less than about 6E-11 M, less than about 5.9E-11 M, less than about 5.8E-11 M, or less than about 5.7E-11 M as measured by surface plasmon resonance or Biacore at 25° C. In some embodiments, an antibody disclosed herein specifically binds human IL23 with a K_{D} of less than about 6E-11 M as measured by surface plasmon resonance or Biacore at 25° C. In some embodiments, an antibody disclosed herein specifically binds human IL23 with a K_{D} of less than about 5.9E-11 M as measured by surface plasmon resonance or Biacore at 25° C. In some embodiments, an antibody disclosed herein specifically binds human IL23 with a K_{D} of less than about 5.8E-11 M as measured by surface plasmon resonance or Biacore at 25° C. In some embodiments, an antibody disclosed herein specifically binds human IL23 with a K_{D} of less than about 5.7E-11 M as measured by surface plasmon resonance or Biacore at 25° C. In some embodiments, an antibody disclosed herein specifically binds human IL23 with a K_{D} of less than about 3E-11 M, less than about 2.9E-11 M, less than about 2.8E-11 M, or less than about 2.7E-11 M as measured by surface plasmon resonance or Biacore at 25° C. In some embodiments, an antibody disclosed herein specifically binds human IL23 with a K_{D} of between about 2.4E-11 and about 1E-10 M as measured by surface plasmon resonance or Biacore at 25° C. In some embodiments, an antibody disclosed herein specifically binds human IL23 with a K_{D} of between about 2.4E-11 and about 5.7E-11 M as measured by surface plasmon resonance or Biacore at 25° C. In some embodiments, an antibody disclosed herein specifically binds human IL23 with a K_{D} of between about 2.4E-11 and about 2.7E-11 M as measured by surface plasmon resonance or Biacore at 25° C. In some embodiments, an antibody disclosed herein specifically binds human IL23 with a K_{D} of between about 2E-11 and about 3E-11 M as measured by surface plasmon resonance or Biacore at 25° C. In some embodiments, an antibody disclosed herein specifically binds human IL23 with a K_{D} of between about 5E-11 and about 6E-11 M as measured by surface plasmon resonance or Biacore at 25° C. In some embodiments, an antibody disclosed herein specifically binds human IL23 with a K_{D} of between about 5.5E-11 and about 6E-11 M as measured by surface plasmon resonance or Biacore at 25° C. In some embodiments, an antibody disclosed herein specifically binds human IL23 with a K_{D} of between about 5.5E-11 and about 5.8E-11 M as measured by surface plasmon resonance or Biacore at 25° C. In some embodiments, an antibody disclosed herein specifically binds human IL23 with a K_{D} of between about 5.6E-11 and about 5.7E-11 M as measured by surface plasmon resonance or Biacore at 25° C.

[0520] Disclosed herein are antibodies that inhibit TL1A (e.g., human TL1A) with strong potency, antibodies that inhibit IL23 (e.g., human IL23, e.g., human IL23p19) with high potency, and antibodies that bind inhibit TL1A (e.g., human TL1A) and IL23 (e.g., human IL23, e.g., human IL23p19) with high potency. Inhibitory activity of an individual Fab binding domain within a bispecific modality would be expected to be ~50% less than the bivalent antibody variant in standard lgG format since binding reflects monovalent versus bivalent neutralization ability. Surprisingly, some antibodies disclosed herein in monovalent format (e.g., as part of a bispecific anti-TL1A×anti-1123 antibody) showed efficacy in inhibiting TL1A activity comparable to or better than comparator bivalent monoclonal antibodies. Likewise, surprisingly, some antibodies disclosed herein in monovalent format (e.g., as part of a bispecific anti-TL1A×anti-IL23 antibody) showed efficacy in inhibiting IL23 activity comparable to or better than comparator bivalent monoclonal antibodies.

[0521] In some embodiments, an antibody disclosed herein inhibits TL1A activity in a TL1A luciferase reporter assay (like described in the examples) with an IC₅₀ of less than about 4.5 nM. In some embodiments, an antibody disclosed herein inhibits TL1A activity in a TL1A luciferase reporter assay with an IC₅₀ of less than about 4.3 nM, less than about 4.2 nM, or less than about 4.1 nM. In some embodiments, an antibody disclosed herein inhibits TL1A activity in a TL1A luciferase reporter assay with an IC₅₀ of less than about 4 nM, less than about 3.9 nM, less than about 3.8 nM, or less than about 3.7 nM. In some embodiments, an antibody disclosed herein inhibits TL1A activity in a TL1A luciferase reporter assay with an IC₅₀ of less than about 3 nM, less than about 2.9 nM, or less than about 2.8 nM. In some embodiments, an antibody disclosed herein inhibits TL1A activity in a TL1A luciferase reporter assay with an IC₅₀ of between about 2.5 nM and about 4.5 nM. In some embodiments, an antibody disclosed herein inhibits TL1A activity in a TL1A luciferase reporter assay with an IC₅₀ of between about 3 nM and about 5 nM. In some embodiments, an antibody disclosed herein inhibits TL1A activity in a TL1A luciferase reporter assay with an IC₅₀ of between about 2.5 nM and about 4 nM. In some embodiments, an antibody disclosed herein inhibits TL1A activity in a TL1A luciferase reporter assay with an IC₅₀ of between about 3.5 nM and about 4.5 nM. In some embodiments, an antibody disclosed herein inhibits TL1A activity in a TL1A luciferase reporter assay with an IC₅₀ of between about 3.5 nM and about 5.5 nM. In some embodiments, an antibody disclosed herein inhibits TL1A activity in a TL1A luciferase reporter assay with an IC₅₀ of between about 4 nM and about 5 nM.

[0522] In some embodiments, an antibody disclosed herein inhibits IL23 activity in an IL23 luciferase reporter assay (like that described in the examples) with an IC₅₀ of less than about 65 pM, less than about 64 pM, or less than about 63 pM. In some embodiments, an antibody disclosed herein inhibits IL23 activity in an IL23 luciferase reporter assay with an IC₅₀ of less than about 60 pM, less than about 59 pM, less than about 58 pM, less than about 57 pM, or less than about 56 pM. In some embodiments, an antibody disclosed herein inhibits IL23 activity in an IL23 luciferase reporter assay with an IC₅₀ of less than about 60 pM. In some embodiments, an antibody disclosed herein inhibits IL23 activity in an IL23 luciferase reporter assay with an IC₅₀ of less than about 59 pM. In some embodiments, an antibody disclosed herein inhibits IL23 activity in an IL23 luciferase reporter assay with an IC₅₀ of less than about 58 pM. In some embodiments, an antibody disclosed herein inhibits IL23 activity in an IL23 luciferase reporter assay with an IC₅₀ of less than about 57 pM. In some embodiments, an antibody disclosed herein inhibits IL23 activity in an IL23 luciferase reporter assay with an IC₅₀ of less than about 56 pM. In some embodiments, an antibody disclosed herein inhibits IL23 activity in an IL23 luciferase reporter assay with an IC₅₀ of less than about 60 pM, less than about 50 pM, less than about 49 pM, or less than about 48 pM. In some embodiments, an antibody disclosed herein inhibits IL23 activity in an IL23 luciferase reporter assay with an IC₅₀ of between about 47 pM and about 63 pM. In some embodiments, an antibody disclosed herein inhibits IL23 activity in an IL23 luciferase reporter assay with an IC₅₀ of between about 47 pM and about 59 pM. In some embodiments, an antibody disclosed herein inhibits IL23 activity in an IL23 luciferase reporter assay with an IC₅₀ of between about 47 pM and about 56 pM. In some embodiments, an antibody disclosed herein inhibits IL23 activity in an IL23 luciferase reporter assay with an IC₅₀ of between about 47 pM and about 50 pM. In some embodiments, an antibody disclosed herein inhibits IL23 activity in an IL23 luciferase reporter assay with an IC₅₀ of between about 45 pM and about 50 pM. In some embodiments, an antibody disclosed herein inhibits IL23 activity in an IL23 luciferase reporter assay with an IC₅₀ of between about 50 pM and about 60 pM. In some embodiments, an antibody disclosed herein inhibits IL23 activity in an IL23 luciferase reporter assay with an IC₅₀ of between about 53 pM and about 57 pM. In some embodiments, an antibody disclosed herein inhibits IL23 activity in an IL23 luciferase reporter assay with an IC₅₀ of between about 54 pM and about 57 pM. In some embodiments, an antibody disclosed herein inhibits IL23 activity in an IL23 luciferase reporter assay with an IC₅₀ of between about 55 pM and about 57 pM. In some embodiments, an antibody disclosed herein inhibits IL23 activity in an IL23 luciferase reporter assay with an IC₅₀ of between about 55 pM and about 56 pM. In some embodiments, an antibody disclosed herein inhibits IL23 activity in an IL23 luciferase reporter assay with an IC₅₀ of between about 50 pM and about 60 pM.

### A. Antibody Compositions for In Vivo Administration

[0523] Embodiments of the invention relate to a pharmaceutical composition comprising a pharmaceutically acceptable carrier and any one of the anti-TL1A antibodies described herein, any one of the anti-IL23 antibodies described herein, any one of the anti-TL1A×anti-IL23 antibodies described herein, a combination of any one of the anti-TL1A antibodies described herein and an anti-IL23 antibody, or a combination of any one of the IL23 antibodies described herein and an anti-TL1A antibody. Formulations of the anti-TL1A antibodies, the anti-IL23 antibodies, the anti-TL1A×anti-IL23 antibodies, or the combinations described herein can be prepared for storage by mixing an antibody having the desired degree of purity with optional pharmaceutically acceptable carriers, excipients, or stabilizers (Remington's Pharmaceutical Sciences 16th edition, Osol, A. Ed. [1980]), in the form of lyophilized formulations or aqueous solutions. Acceptable carriers, excipients, or stabilizers are nontoxic to recipients at the dosages and concentrations employed, and include buffers such as phosphate, citrate, and other organic acids; antioxidants including ascorbic acid and methionine; preservatives (such as octadecyldimethylbenzyl ammonium chloride; hexamethonium chloride; benzalkonium chloride, benzethonium chloride; phenol, butyl or benzyl alcohol; alkyl parabens such as methyl or propyl paraben; catechol; resorcinol; cyclohexanol; 3-pentanol; and m-cresol); low molecular weight (less than about 10 residues) polypeptides; proteins, such as serum albumin, gelatin, or immunoglobulins; hydrophilic polymers such as polyvinylpyrrolidone; amino acids such as glycine, glutamine, asparagine, histidine, arginine, or lysine; monosaccharides, disaccharides, and other carbohydrates including glucose, mannose, or dextrins; chelating agents such as EDTA; sugars such as sucrose, mannitol, trehalose or sorbitol; salt-forming counter-ions such as sodium; metal complexes (e.g., Zn-protein complexes); and/or non-ionic surfactants such as TWEEN™ PLURONICS™ or polyethylene glycol (PEG).

### B. Kits and Delivery Devices

[0524] In another aspect, provided are kits or vessels or delivery devices comprising any one of the anti-TL1A antibodies described herein, any one of the anti-IL23 antibodies described herein, any one of the anti-TL1A×anti-IL23 antibodies described herein, a combination of any one of the anti-TL1A antibodies described herein and an anti-IL23 antibody, or a combination of any one of the IL23 antibodies described herein and an anti-TL1A antibody or any of the pharmaceutical compositions described herein. Such kits can further comprise, for example: (i) a device for administering the aforementioned antibodies or pharmaceutical compositions; and/or (ii) instructions for use. Containers used in such kits may typically comprise at least one vial, test tube, flask, bottle, syringe, or other suitable container into which one or more of the antibodies or pharmaceutical compositions may be placed, and preferably aliquoted appropriately.

[0525] Where a second therapeutic agent is also provided (e.g., combinations of an anti-TL1A antibody and a separate anti-IL23 antibody), the kit may also contain a second, different container in which the second antibody may be placed. Alternatively, multiple compounds can be prepared as a single pharmaceutical composition and packaged in a single container device such as a vial, flask, syringe, bottle, or other suitable single container.

[0526] Also provided are drug delivery devices (e.g., plastic or vial, such as a hollow pin or syringe barrel) that can be used to administer the antibody or pharmaceutical composition. The device can introduce a substance into the patient via parenteral routes (such as subcutaneously or intravenously). For example, the injection device may be a syringe (e.g., a prefilled syringe with an antibody or pharmaceutical composition described herein, such as an autoinjector), which may include a syringe and a needle (can be used to pierce skin and/or blood vessels) containing the fluid to be injected (e.g., the antibody or pharmaceutical composition described herein).

### VII. Treatments

[0527] Once made, the anti-TL1A×anti-IL23 antibody compositions of the invention find use in a number of applications, for example, in the treatment of a TL1A-associated and/or IL23-associated disease or condition or in the preparation of medicaments for treating such diseases or conditions. Likewise, the anti-TL1A antibody compositions can find use in the treatment of a TL1A-associated disease or condition, and the anti-IL23 antibody compositions can find use in the treatment of an IL23-associated disease or condition, or in the preparation of medicaments for treating such diseases or conditions. Likewise, combinations of an anti-TL1A antibody and an anti-IL23 antibody can find use in the treatment of a TL1A-associated and/or IL23-associated disease or condition or in the preparation of medicaments for treating such diseases or conditions. Examples of a TL1A-associated and/or IL23-associated disease or condition include diseases or conditions associated with a TL1A- and/or IL23-mediated inflammatory response, TL1A- and/or IL23-mediated autoimmune diseases or conditions, and TL1A- and/or IL23-mediated fibrotic diseases or conditions. Some non-limiting examples of a TL1A-associated and/or IL23-associated disease or condition are inflammatory bowel disease, ulcerative colitis, Crohn's disease, fibrostenotic Crohn's disease, systemic sclerosis, interstitial lung disease, primary biliary cholangitis, primary sclerosing cholangitis, rheumatoid arthritis, and atopic dermatitis. Some specific examples of a TL1A-associated and/or IL23-associated disease or condition that can be treated by the compositions disclosed herein are inflammatory bowel diseases such as ulcerative colitis and Crohn's disease.

[0528] Once made, the anti-TL1A×anti-IL23 antibody compositions of the invention find use in a number of applications, for example, in the treatment of diseases or conditions associated with a TL1A- and/or IL23-mediated inflammatory response or inflammatory diseases or conditions or in the preparation of medicaments for treating such diseases or conditions. Likewise, the anti-TL1A antibody compositions can find use in the treatment of diseases or conditions associated with a TL1A-mediated inflammatory response or inflammatory diseases or conditions, and the anti-IL23 antibody compositions can find use in the treatment of diseases or conditions associated with an IL23-mediated inflammatory response or inflammatory diseases or conditions, or in the preparation of medicaments for treating such diseases or conditions. Likewise, combinations of an anti-TL1A antibody and an anti-IL23 antibody can find use in the treatment of diseases or conditions associated with a TL1A- and/or IL23-mediated inflammatory response or inflammatory diseases or conditions or in the preparation of medicaments for treating such diseases or conditions. Non-limiting examples of inflammatory diseases or conditions include allergies, ankylosing spondylitis, asthma, atopic dermatitis, autoimmune diseases or conditions, cancer, celiac disease, chronic obstructive pulmonary disease (COPD), chronic peptic ulcer, cystic fibrosis, diabetes mellitus (e.g., type 1 diabetes and type 2 diabetes), glomerulonephritis, gout, hepatitis (e.g., active hepatitis), inflammatory bowel disease (IBD) such as Crohn's disease and ulcerative colitis, myositis, osteoarthritis, pelvic inflammatory disease (PID), multiple sclerosis, neurodegenerative diseases of aging, periodontal disease (e.g., periodontitis), reperfusion injury, transplantation rejection, psoriasis, pulmonary fibrosis, rheumatic diseases, scleroderma, sinusitis, and tuberculosis.

[0529] The anti-TL1A×anti-IL23 antibody compositions of the invention can also find use in the treatment of TL1A- and/or IL23-mediated autoimmune diseases or conditions or in the preparation of medicaments for treating such diseases or conditions. Likewise, the anti-TL1A antibody compositions can find use in the treatment of TL1A-mediated autoimmune diseases or conditions, and the anti-IL23 antibody compositions can find use in the treatment of IL23-mediated autoimmune diseases or conditions, or in the preparation of medicaments for treating such diseases or conditions. Likewise, combinations of an anti-TL1A antibody and an anti-IL23 antibody can find use in the treatment of TL1A- and/or IL23-mediated autoimmune diseases or conditions or in the preparation of medicaments for treating such diseases or conditions. Non-limiting examples of autoimmune diseases or conditions include achalasia, Addison's disease, adult Still's disease, agammaglobulinemia, alopecia areata, amyloidosis, ankylosing spondylitis, anti-GBM/anti-TBM nephritis, antiphospholipid syndrome, autoimmune angioedema, autoimmune dysautonomia, autoimmune encephalomyelitis, autoimmune hepatitis, autoimmune inner ear disease (AIED), autoimmune myocarditis, autoimmune oophoritis, autoimmune orchitis, autoimmune pancreatitis, autoimmune retinopathy, autoimmune urticaria, axonal & neuronal neuropathy (AM AN), Balo's disease, Behcet's disease, benign mucosal pemphigoid, bullous pemphigoid, Castleman disease (CD), celiac disease, Chagas disease, chronic inflammatory demyelinating polyneuropathy (CIDP), chronic recurrent multifocal osteomyelitis (CRMO), Churg-Strauss syndrome (CSS) or eosinophilic granulomatosis (EGPA), cicatricial pemphigoid, Cogan's syndrome, cold agglutinin disease, congenital heart block, coxsackie myocarditis, CREST syndrome, Crohn's disease, dermatitis herpetiformis, dermatomyositis, Devic's disease (neuromyelitis optica), discoid lupus, Dressler's syndrome, endometriosis, eosinophilic esophagitis (EoE), eosinophilic fasciitis, erythema nodosum, essential mixed cryoglobulinemia, Evans syndrome, fibromyalgia, fibrosing alveolitis, giant cell arteritis (temporal arteritis), giant cell myocarditis, glomerulonephritis, Goodpasture's syndrome, granulomatosis with polyangiitis, Graves' disease, Guillain-Barre syndrome, Hashimoto's thyroiditis, hemolytic anemia, Henoch-Schonlein purpura (HSP), herpes gestationis or pemphigoid gestationis (PG), hidradenitis suppurativa (HS) (acne in versa), hypogammaglobulinemia, IgA nephropathy, IgG4-related sclerosing disease, immune thrombocytopenic purpura (ITP), inclusion body myositis (IBM), interstitial cystitis (IC), juvenile arthritis, juvenile diabetes (Type 1 diabetes), juvenile myositis (JM), Kawasaki disease, Lambert-Eaton syndrome, leukocytoclastic vasculitis, lichen planus, lichen sclerosus, ligneous conjunctivitis, linear IgA disease (LAD), lupus, chronic Lyme disease, Meniere's disease, microscopic polyangiitis (MPA), mixed connective tissue disease (MCTD), Mooren's ulcer, Mucha-Habermann disease, multifocal motor neuropathy (MMN) or MMNCB, multiple sclerosis, myasthenia gravis, myositis, narcolepsy, neonatal lupus, neuromyelitis optica, neutropenia, ocular cicatricial pemphigoid, optic neuritis, palindromic rheumatism (PR), PANDAS, paraneoplastic cerebellar degeneration (PCD), paroxysmal nocturnal hemoglobinuria (PNH), Parry-Romberg syndrome, pars planitis (peripheral uveitis), Parsonnage-Turner syndrome, pemphigus, peripheral neuropathy, perivenous encephalomyelitis, pernicious anemia (PA), POEMS syndrome, polyarteritis nodosa, polyglandular syndrome type I, polyglandular syndrome type II, polyglandular syndrome type III, polymyalgia rheumatica, polymyositis, post-myocardial infarction syndrome, post-pericardiotomy syndrome, primary biliary cirrhosis, primary sclerosing cholangitis, progesterone dermatitis, psoriasis, psoriatic arthritis, pure red cell aplasia (PRCA), pyoderma gangrenosum, Raynaud's phenomenon, reactive arthritis, reflex sympathetic dystrophy, relapsing polychondritis, restless legs syndrome (RLS), retroperitoneal fibrosis, rheumatic fever, rheumatoid arthritis, sarcoidosis, Schmidt syndrome, scleritis, scleroderma, Sjogren's syndrome, sperm & testicular autoimmunity, stiff person syndrome (SPS), subacute bacterial endocarditis (SBE), Susac's syndrome, sympathetic ophthalmia (SO), Takayasu's arteritis, temporal arteritis/giant cell arteritis, thrombocytopenic purpura (TTP), Tolosa-Hunt syndrome (THS), transverse myelitis, type 1 diabetes, ulcerative colitis (UC), undifferentiated connective tissue disease (UCTD), uveitis, vasculitis, vitiligo, and Vogt-Koyanagi-Harada Disease.

[0530] The anti-TL1A×anti-IL23 antibody compositions of the invention can also find use in the treatment of TL1A- and/or IL23-mediated fibrotic diseases or conditions or in the preparation of medicaments for treating such diseases or conditions. Likewise, the anti-TL1A antibody compositions can find use in the treatment of TL1A-mediated fibrotic diseases or conditions, and the anti-IL23 antibody compositions can find use in the treatment of IL23-mediated fibrotic diseases or conditions, or in the preparation of medicaments for treating such diseases or conditions. Likewise, combinations of an anti-TL1A antibody and an anti-IL23 antibody can find use in the treatment of TL1A- and/or IL23-mediated fibrotic diseases or conditions or in the preparation of medicaments for treating such diseases or conditions. “Fibrotic disease or condition” means a disease or condition characterized by fibrosis, including but not limited to: respiratory conditions such as pulmonary fibrosis, cystic fibrosis, idiopathic pulmonary fibrosis, progressive massive fibrosis, scleroderma, obliterative bronchiolitis, Hermansky-Pudlak syndrome, asbestosis, silicosis, chronic pulmonary hypertension, AIDS-associated pulmonary hypertension, sarcoidosis, tumor stroma in lung disease, and asthma; chronic liver disease, primary biliary cirrhosis (PBC), schistosomal liver disease, liver cirrhosis; cardiovascular conditions such as hypertrophic cardiomyopathy, dilated cardiomyopathy (DCM), fibrosis of the atrium, atrial fibrillation, fibrosis of the ventricle, ventricular fibrillation, myocardial fibrosis, Brugada syndrome, myocarditis, endomyocardial fibrosis, myocardial infarction, fibrotic vascular disease, hypertensive heart disease, arrhythmogenic right ventricular cardiomyopathy (ARVC), tubulointerstitial and glomerular fibrosis, atherosclerosis, varicose veins, cerebral infarcts; neurological conditions such as gliosis and Alzheimer's disease; muscular dystrophies such as Duchenne muscular dystrophy (DMD) or Beckers muscular dystrophy (BMD); gastrointestinal conditions such as Crohn's disease, microscopic colitis and primary sclerosing cholangitis (PSC); skin conditions such as scleroderma, nephrogenic systemic fibrosis and cutis keloid; arthrofibrosis; Dupuytren's contracture; mediastinal fibrosis; retroperitoneal fibrosis; myelofibrosis; Peyronie's disease; adhesive capsulitis; kidney disease (e.g., renal fibrosis, nephritic syndrome, Alport's syndrome, HIV associated nephropathy, polycystic kidney disease, Fabry's disease, diabetic nephropathy, chronic glomerulonephritis, nephritis associated with systemic lupus); progressive systemic sclerosis (PSS); chronic graft versus host disease; diseases of the eye such as Grave's opthalmopathy, epiretinal fibrosis, retinal fibrosis, subretinal fibrosis (e.g. associated with macular degeneration (e.g. wet age-related macular degeneration (AMD)), diabetic retinopathy, glaucoma, corneal fibrosis, post-surgical fibrosis (e.g., of the posterior capsule following cataract surgery, or of the bleb following trabeculectomy for glaucoma), conjunctival fibrosis, subconjunctival fibrosis; arthritis; fibrotic pre-neoplastic and fibrotic neoplastic disease; and fibrosis induced by chemical or environmental insult (e.g., cancer chemotherapy, pesticides, radiation/cancer radiotherapy).

[0531] In one aspect, provided herein are methods of inhibiting a TL1A-mediated inflammatory, autoimmune, and/or fibrotic response or activity using the subject anti-TL1A antibody or anti-TL1A×anti-IL23 antibody or the use of such antibodies in such methods or the use of such antibodies in the preparation of reagents or medicaments for use in such methods. TL1A is a cytokine that is secreted by antigen-presenting cells, T cells, and endothelial cells. TL1A signals through death receptor 3 (DR3), a TNF-family receptor that is found primarily on T cells, natural killer (NK) and NK-T cells, innate lymphoid cells (ILC), fibroblasts, and epithelial cells and potently drives Th1, Th2, Th9 and Th17 responses. In addition, it is induced in antigen-presenting cells by toll like receptor (TLR) ligands and FcR cross-linking and in T cells by T cell receptor (TCR) stimulation. TL1A binding to DR3 on innate immune and T cells leads to an early cytokine response (release of IL-23, IL-1β, IL-17, IL-22, TNF-α, IFN-γ, and IL-13) that sets the stage for inflammation and stimulates innate and adaptive immune response. For instance, through binding to DR3, TL1A potentially drives inflammatory Th1 and Th17 responses. Further, binding of TL1A to DR3 on fibroblasts directly activates fibroblasts and leads to collagen disposition and fibrosis independent of inflammation. In some embodiments the TL1A-mediated response or activity is associated with TL1A/DR3 signaling. In some embodiments, the subject anti-TL1A antibody or anti-TL1A×anti-IL23 antibody blocks, inhibits, attenuates, or reduces TL1A binding to the natural TL1A receptor, DR3. In some embodiments, the subject anti-TL1A antibody or anti-TL1A×anti-IL23 antibody blocks, inhibits, attenuates, or reduces TL1A-mediated signaling. In some embodiments, the subject anti-TL1A antibody or anti-TL1A×anti-IL23 antibody blocks, inhibits, attenuates, or reduces TL1A protein levels in circulation and/or diseased tissues. In some embodiments, the subject anti-TL1A antibody or anti-TL1A×anti-IL23 antibody inhibits TL1A/DR3-mediated apoptosis. In some embodiments, the anti-TL1A antibody or anti-TL1A×anti-IL23 antibody inhibits TL1A/DR3 signaling-mediated inflammation.

[0532] In some embodiments, the anti-TL1A antibody or anti-TL1A×anti-IL23 antibody inhibits NFκB signaling. In some embodiments, the anti-TL1A antibody or anti-TL1A×anti-IL23 antibody inhibits TL1A/DR3 signaling-mediated activity, wherein the DR3 is expressed on a lymphocyte, NK cell, NK-T cell, ILC, or epithelial cell. In some embodiments, the anti-TL1A antibody or anti-TL1A×anti-IL23 antibody inhibits TL1A-induced cytokine secretion, optionally wherein the cytokine is selected from interferon-gamma (IFNγ), interleukin-1beta (IL1β), tumor necrosis factor-alpha (TNFα), transforming growth factor-beta (TGFβ), and granulocyte-macrophage colony stimulating factor (GM-CSF). In some embodiments, the anti-TL1A antibody or anti-TL1A×anti-IL23 antibody inhibits the activity of a Th1, Th17, Th2, or Th 9 cell. In some embodiments, the anti-TL1A antibody or anti-TL1A×anti-IL23 antibody inhibits the secretion or production of one or more of the following cytokines: IL10, IL4, IL9, IL13, IL12, IL17, IL18, IL22, IL23, IFNγ, and TNFα. In some embodiments, the anti-TL1A antibody or anti-TL1A×anti-IL23 antibody inhibits TL1A/DR3 signaling-mediated activity in a human subject.

[0533] In another aspect, provided herein are methods of inhibiting an IL23-mediated inflammatory, autoimmune, and/or fibrotic response or activity using the subject anti-IL23 antibody or anti-TL1A×anti-IL23 antibody or the use of such antibodies in such methods or the use of such antibodies in the preparation of reagents or medicaments for use in such methods. IL23 is a heterodimeric cytokine composed of a unique p19 subunit and a common p40 subunit shared with IL12. IL23 engages with the heterodimeric IL23 receptor (IL23R; consisting of an IL23R chain and an IL12Rβ1 chain), activates intracellular JAKs (mainly through TYK2 and JAK2) and signal transducer and activator of transcription (STAT) pathways, among other signaling factors, which in turn regulates transcription of downstream genes. IL23 is one of the key promotors of the Th17 cell pathway, which has been implicated in many inflammatory diseases and conditions. In some embodiments, the IL23-mediated response or activity is associated with IL23/IL23R signaling. In some embodiments, the subject anti-IL23 antibody or anti-TL1A×anti-IL23 antibody blocks, inhibits, attenuates, or reduces IL23 binding to the natural IL23 receptor, IL23R. In some embodiments, the subject anti-IL23 antibody or anti-TL1A×anti-IL23 antibody blocks, inhibits, attenuates, or reduces IL23-mediated signaling. In some embodiments, the subject anti-IL23 antibody or anti-TL1A×anti-IL23 antibody blocks, inhibits, attenuates, or reduces IL23 protein levels in circulation and/or diseased tissues. In some embodiments, the subject anti-IL23 antibody or anti-TL1A×anti-IL23 antibody binds to IL23 but does not bind to IL12.

[0534] In another aspect, provided herein are methods of inhibiting an inflammatory, autoimmune, and/or fibrotic response or activity mediated by both TL1A and IL23 using the combination of the subject anti-TL1A antibody and anti-IL23 antibody or the subject anti-TL1A×anti-IL23 antibody or the use of such antibodies in such methods or the use of such antibodies in the preparation of reagents or medicaments for use in such methods. Certain inflammatory immune cells express both TL1A and IL23 pathway receptors, and inhibition of both pathways may be needed in order to completely neutralize the proinflammatory function of such inflammatory immune cells. Additionally, inflammatory immune cells that express receptors for either pathway alone can also contribute to inflammation and disease independently. Accordingly, inhibition of both pathways may be beneficial in that it could inhibit larger populations of inflammatory immune cells and/or achieve synergistic inhibition over inhibiting either pathway independently. In some embodiments, the TL1A and IL23-mediated response or activity is associated with TL1A/DR3 and IL23/IL23R signaling. In some embodiments, the combination of the subject anti-TL1A antibody and anti-IL23 antibody or the subject anti-TL1A×anti-IL23 antibody blocks, inhibits, attenuates, or reduces both TL1A binding to DR3 and IL23 binding to IL23R. In some embodiments, the combination of the subject anti-TL1A antibody and anti-IL23 antibody or the subject anti-TL1A×anti-IL23 antibody blocks, inhibits, attenuates, or reduces TL1A- and IL23-mediated signaling. In some embodiments, the combination of the subject anti-TL1A antibody and anti-IL23 antibody or the subject anti-TL1A×anti-IL23 antibody blocks, inhibits, attenuates, or reduces TL1A and IL23 protein levels in circulation and/or diseased tissues.

### A. Administrative Modalities

[0535] The antibodies provided herein administered to a subject, in accord with known methods, such as intravenous administration as a bolus or by continuous infusion over a period of time.

[0536] Antibodies can be administered via a peripheral route. Routes for administration of antibodies can be, for example, intravenous or subcutaneous.

### B. Treatment Modalities

[0537] In the methods of the invention, therapy is used to provide a positive therapeutic response with respect to a disease or condition.

[0538] By “positive therapeutic response” is intended an improvement in the disease or condition, and/or an improvement in the signs or symptoms associated with the disease or condition. The positive therapeutic response may be prophylactic in terms of completely or partially preventing a disease or symptom thereof and/or may be therapeutic in terms of effecting a partial or complete cure for a disease and/or symptom thereof. “Treatment,” as used herein, may include treatment of a disease or disorder (e.g. an inflammatory disease, an autoimmune disease, or a fibrotic disease) in a mammal, particularly in a human, and includes: (a) preventing the disease or a symptom of a disease from occurring in a subject which may be predisposed to the disease but has not yet been diagnosed as having it (including diseases that may be associated with or caused by a primary disease); (b) inhibiting the disease, i.e., arresting its development; and (c) relieving the disease, i.e., causing regression of the disease. Treating may refer to any indicia of success in the treatment or amelioration or prevention of the disease, including any objective or subjective parameter such as abatement; remission; diminishing of symptoms or making the disease condition more tolerable to the patient; slowing in the rate of degeneration or decline; or making the final point of degeneration less debilitating. The treatment or amelioration of symptoms is based on one or more objective or subjective parameters; including the results of an examination by a physician. For example, a positive therapeutic response in a subject with moderate to severely active ulcerative colitis could refer to one or more of the following improvements: (1) endoscopic improvement (defined by endoscopy subscore of ≤1 with no friability in the 3-component Modified Mayo Score); (2) a 3-component Modified Mayo Score clinical response in the subject (defined by reduction from baseline ≥2 points and reduction ≥30% in 3-component Modified Mayo Score, accompanied by a reduction ≥1 in rectal bleeding subscore or absolute rectal bleeding subscore ≤1); (3) a 3-component Modified Mayo Score clinical remission in the subject (defined by an endoscopic subscore of 0 or 1, rectal bleeding subscore of 0, and stool frequency subscore of 0 or 1 and not greater than baseline); and (4) histologic remission (defined by Geboes score ≤3.1).

[0539] Positive therapeutic responses in any given disease or condition can be determined by standardized response criteria specific to that disease or condition. As described above, response to inflammatory conditions like ulcerative colitis can be assessed using standardized scoring methods that assess symptoms with standard screening methods such as questionnaires, endoscopic procedures, and histologic analysis. Positive therapeutic responses can be determined in an individual subject by comparing sign(s) and/or symptom(s) of a condition after treatment to baseline value(s) before treatment. The term “symptom” refers to a subjective evidence of a disease, such as altered gait, as perceived by the subject. A “sign” refers to objective evidence of a disease as observed by a physician. Positive therapeutic responses can also be determined by comparing a treated population with a control population not receiving an agent under test.

[0540] In addition to these positive therapeutic responses, the subject undergoing therapy may experience the beneficial effect of an improvement in the symptoms associated with the disease.

[0541] Treatment according to the present invention includes a “therapeutically effective amount” or “therapeutically effective regimen” of the medicaments used. A “therapeutically effective amount” refers to an amount effective, at dosages and for periods of time necessary, to achieve a desired therapeutic result. A “therapeutically effective regimen” refers to a combination of dose, frequency of administration, and route of administration effective to achieve a desired therapeutic result. For example, the desired therapeutic result can be an amount/regimen sufficient to alleviate one or more signs and/or symptoms of a disease in the treated subject, whether by inducing the regression or elimination of such signs and/or symptoms or by inhibiting the progression of such signs and/or symptoms. In some instances, therapeutic efficacy can be observed in an individual patient relative to historical controls or past experience in the same patient. In other instances, therapeutic efficacy can be demonstrated in a preclinical or clinical trial in a population of treated patients relative to a control population of untreated patients.

[0542] A therapeutically effective amount may vary according to factors such as the disease state, age, sex, and weight of the individual, and the ability of the medicaments to elicit a desired response in the individual. A therapeutically effective amount is also one in which any toxic or detrimental effects of the antibody or antibody portion are outweighed by the therapeutically beneficial effects. The dose amount may vary depending upon the age and the size of a subject to be administered, target disease, conditions, route of administration, and the like. In certain embodiments, the initial dose may be followed by administration of a second or a plurality of subsequent doses.

[0543] Alternatively, this property of a composition may be evaluated by examining the ability of the compound to inhibit cell growth or to induce apoptosis by in vitro assays. A therapeutically effective amount of a therapeutic compound may decrease tumor size, or otherwise ameliorate symptoms in a subject. Such amounts may vary based on such factors as the subject's size, the severity of the subject's symptoms, and the particular composition or route of administration selected.

[0544] Dosage regimens are adjusted to provide the optimum desired response (e.g., a therapeutic response). For example, a single bolus may be administered, several divided doses may be administered over time or the dose may be proportionally reduced or increased as indicated by the exigencies of the therapeutic situation. Parenteral compositions may be formulated in dosage unit form for ease of administration and uniformity of dosage. Dosage unit form as used herein refers to physically discrete units suited as unitary dosages for the subjects to be treated; each unit contains a predetermined quantity of active compound calculated to produce the desired therapeutic effect in association with the required pharmaceutical carrier.

[0545] The specification for the dosage unit forms of the present invention are dictated by and directly dependent on (a) the unique characteristics of the active compound and the particular therapeutic effect to be achieved, and (b) the limitations inherent in the art of compounding such an active compound for the treatment of sensitivity in individuals.

[0546] The efficient dosages and the dosage regimens for the bispecific antibodies used in the present invention depend on the disease or condition to be treated.

[0547] All patent filings, websites, other publications, accession numbers and the like cited above or below are incorporated by reference in their entirety for all purposes to the same extent as if each individual item were specifically and individually indicated to be so incorporated by reference. If different versions of a sequence are associated with an accession number at different times, the version associated with the accession number at the effective filing date of this application is meant. The effective filing date means the earlier of the actual filing date or filing date of a priority application referring to the accession number if applicable. Likewise, if different versions of a publication, website or the like are published at different times, the version most recently published at the effective filing date of the application is meant unless otherwise indicated. Any feature, step, element, embodiment, or aspect of the invention can be used in combination with any other unless specifically indicated otherwise. Although the present invention has been described in some detail by way of illustration and example for purposes of clarity and understanding, it will be apparent that certain changes and modifications may be practiced within the scope of the appended claims.

### BRIEF DESCRIPTION OF THE SEQUENCES

[0548] The nucleotide and amino acid sequences listed in the accompanying sequence listing are shown using standard letter abbreviations for nucleotide bases, and three-letter code for amino acids. The nucleotide sequences follow the standard convention of beginning at the 5′ end of the sequence and proceeding forward (i.e., from left to right in each line) to the 3′ end. Only one strand of each nucleotide sequence is shown, but the complementary strand is understood to be included by any reference to the displayed strand. When a nucleotide sequence encoding an amino acid sequence is provided, it is understood that codon degenerate variants thereof that encode the same amino acid sequence are also provided. The amino acid sequences follow the standard convention of beginning at the amino terminus of the sequence and proceeding forward (i.e., from left to right in each line) to the carboxy terminus.

TABLE 21

| SEQ ID | | |
|---|---|---|
| NO | Type | Description |
| 1 | Protein | Human IL23A |
| 2 | Protein | Mouse IL23A |
| 3 | Protein | Cynomolgus IL23A |
| 4 | Protein | Human TL1A |
| 5 | Protein | Mouse TL1A |
| 6 | Protein | Rat TL1A |
| 7-17 | Protein | Positively charged scFv linkers |
| 18-25 | Protein | Negatively charged scFv linkers |
| 26-29 | Protein | Additional scFv linkers |
| 30 | Skipped | Skipped |
| 31-57 | Protein | Useful domain linkers |
| 58 | Protein | Heterodimeric Fc Backbone 1 monomer 1 (−) |
| 59 | Protein | Heterodimeric Fc Backbone 1 monomer 2 (+) |
| 60 | Protein | Heterodimeric Fc Backbone 2 monomer 1 (−) |
| 61 | Protein | Heterodimeric Fc Backbone 2 monomer 2 (+) |
| 62 | Protein | Heterodimeric Fc Backbone 3 monomer 1 (−) |
| 63 | Protein | Heterodimeric Fc Backbone 3 monomer 2 (+) |
| 64 | Protein | Heterodimeric Fc Backbone 4 monomer 1 (−) |
| 65 | Protein | Heterodimeric Fc Backbone 4 monomer 2 (+) |
| 66 | Protein | Heterodimeric Fc Backbone 5 monomer 1 (−) |
| 67 | Protein | Heterodimeric Fc Backbone 5 monomer 2 (+) |
| 68 | Protein | Heterodimeric Fc Backbone 6 monomer 1 (−) |
| 69 | Protein | Heterodimeric Fc Backbone 6 monomer 2 (+) |
| 70 | Protein | Heterodimeric Fc Backbone 7 monomer 1 (−) |
| 71 | Protein | Heterodimeric Fc Backbone 7 monomer 2 (+) |
| 72 | Protein | Heterodimeric Fc Backbone 8 monomer 1 (−) |
| 73 | Protein | Heterodimeric Fc Backbone 8 monomer 2 (+) |
| 74 | Protein | Heterodimeric Fc Backbone 9 monomer 1 (−) |
| 75 | Protein | Heterodimeric Fc Backbone 9 monomer 2 (+) |
| 76 | Protein | Heterodimeric Fc Backbone 10 monomer 1 (−) |
| 77 | Protein | Heterodimeric Fc Backbone 10 monomer 2 (+) |
| 78 | Protein | Heterodimeric Fc Backbone 11 monomer 1 (−) |
| 79 | Protein | Heterodimeric Fc Backbone 11 monomer 2 (+) |
| 80 | Protein | Heterodimeric Fc Backbone 12 monomer 1 (−) |
| 81 | Protein | Heterodimeric Fc Backbone 12 monomer 2 (+) |
| 82 | Protein | Heterodimeric Fc Backbone 13 monomer 1 |
| 83 | Protein | Heterodimeric Fc Backbone 13 monomer 2 |
| 84 | Protein | Heterodimeric Fc Backbone 14 monomer 1 |
| 85 | Protein | Heterodimeric Fc Backbone 14 monomer 2 |
| 86 | Protein | Heterodimeric Fc Backbone 15 monomer 1 |
| 87 | Protein | Heterodimeric Fc Backbone 15 monomer 2 |
| 88 | Protein | 2 + 1 mAb-scFv Heterodimeric Fc Backbone monomer 1 |
| 89 | Protein | 2 + 1 mAb-scFv Heterodimeric Fc Backbone monomer 2 |
| 90 | Protein | IgG1 CH1(+) |
| 91 | Protein | IgG1 CH1(−) |
| 92 | Protein | IgG2 CH1(+) |
| 93 | Protein | IgG2 CH1(−) |
| 94 | Protein | IgG4 CH1(+) |
| 95 | Protein | IgG4 CH1(−) |
| 96 | Protein | IgG1 hinge |
| 97 | Protein | IgG2 hinge |
| 98 | Protein | IgG4 hinge |
| 99 | Protein | Light chain constant domain - kappa |
| 100 | Protein | Light chain constant domain - lambda |
| 101-176 | Protein | Variable heavy chain, variable light chain, and associated CDR sequences for |
| | | TL1A binding domains |
| 177 | Protein | XENP49698_IL23-A[IL23]_H1L1_Fab-IgG1_PVA_/S267K/M428L/N434S |
| | | Chain 1- IL23-A[IL23]_H1_Fab-IgG1_PVA_/S267K/M428L/N434S |
| 178 | Protein | XENP49698_IL23-A[IL23]_H1L1_Fab-IgG1_PVA_/S267K/M428L/N434S |
| | | Chain 2- IL23-A[IL23]_L1_Light Chain |
| 179-185 | Protein | Variable heavy chain, variable light chain, and associated CDR sequences for |
| | | IL23-A binding domains |
| 186-1019 | Protein | Illustrative sequences for TL1A × IL23 bsAbs in the 1 + 1-Fab-scFv-Fc format |
| 1020-1155 | Protein | Illustrative sequences for TL1A × IL23 bsAbs in the 1 + 1 OrthoFab format |
| 1156-1161 | Protein | Illustrative sequences for TL1A × IL23 bsAbs in the CLC 1 + 1 format |
| 1162-1175 | Protein | Illustrative sequences for TL1A × IL23 bsAbs in additional bispecific formats |
| 1176-1199 | Protein | Illustrative sequences for TL1A × IL23 bsAbs in the CrossMab format |
| 1200-1247 | Protein | Variable heavy chain, variable light chain, and associated CDR sequences for |
| | | additional TL1A binding domains |
| 1248-1290 | Protein | Variable heavy chain, variable light chain, and associated CDR sequences for |
| | | additional IL23 binding domains |
| 1291-1394 | Protein | Illustrative sequences for TL1A × IL23 bsAbs in CrossMab-VH-VL charge-swap |
| | | 1 + 1 format |
| 1395-1398 | Skipped | Skipped |
| 1399-1404 | Protein | Bispecific sequences utilizing TL1A and RSV or IL23 and RSV |
| 1405-1420 | Protein | Sequences for bivalent TL1A mAbs utilized as controls |
| 1421-1424 | Protein | Sequences for bivalent IL23 mAbs utilized as controls |
| 1425-1426 | Protein | Sequences for bivalent IL12 mAbs utilized as controls |
| 1427-1823 | Protein | Sequences for superhumanized and affinity-engineered variable heavy domains |
| | | (H1.1-H1.486) from anti-TL1A clone 041 (CDR1 residues 31-35; CDR2 residues |
| | | 50-65; CDR3 residues 98-113) |
| 1824-1923 | Protein | Sequences for superhumanized and affinity-engineered variable light domains |
| | | (L1.1-L1.104) from anti-TL1A clone 041 (CDR1 residues 24-34; CDR2 residues |
| | | 50-56; CDR3 residues 89-97) |
| 1924-1926 | Protein | Variable domain and associated CDR sequences for illustrative superhumanized |
| | | and affinity-optimized 041 VH/VL pairs |
| 1927-2132 | Protein | Sequences for affinity-engineered variable heavy domain (H1.1-H1.206) from |
| | | anti-IL23 clone IL23-A (CDR1 residues 31-35; CDR2 residues 50-66; CDR3 |
| | | residues 99-109) |
| 2133-2232 | Protein | Sequences for affinity-engineered variable light domain (L1.1-L1.117) from anti- |
| | | IL23 clone IL23-A (CDR1 residues 24-34; CDR2 residues 50-56; CDR3 residues |
| | | 89-97) |
| 2233-2239 | Protein | Sequences for illustrative affinity-optimized IL23-A VH/VL pairs |
| 2240-2271 | Protein | Sequences in Table 44 and skipped sequences |
| 2272-2311 | Protein | Illustrative sequences for TL1A × IL23 bsAbs in the 1 + 1 OrthoFab format |
| 2312-2315 | Protein | Illustrative sequences for TL1A × IL23 bsAbs in CrossMab-VH-VL charge-swap |
| | | 1 + 1 format |
| 2316-2330 | Protein | Sequences for superhumanized and affinity-engineered variable heavy domains |
| | | (H1.1-H1.486) from anti-TL1A clone 041 (CDR1 residues 31-35; CDR2 residues |
| | | 50-65; CDR3 residues 98-113) |
| 2331 | Protein | Comp18 TL1A variable light domain |
| 2332 | Protein | Comp18 TL1A variable heavy domain A |
| 2333 | Protein | Comp18 TL1A variable heavy domain B |
| 2334 | Protein | Comp18 TL1A variable heavy domain C |
| 2335 | Protein | Comp18 TL1A variable heavy domain D |
| 2336 | Protein | Comp18 TL1A variable heavy domain E |
| 2337 | Protein | Comp18 TL1A variable heavy domain F |
| 2338 | Protein | Comp18 TL1A variable heavy domain G |
| 2339 | Protein | Comp18 TL1A variable heavy domain H |
| 2340 | Protein | Comp18 TL1A variable heavy domain I |
| 2341 | Protein | Comp18 TL1A variable heavy domain J |
| 2342-2343 | Protein | Comp 19 TL1A VH/VL pair |
| 2344-2345 | Protein | Comp20 TL1A VH/VL pair |
| 2346-2347 | Protein | Comp21 TL1A VH/VL pair |
| 2348-2349 | Protein | Comp22 TL1A VH/VL pair |
| 2350-2351 | Protein | Comp23 TL1A VH/VL pair |
| 2352-2353 | Protein | Comp24 TL1A VH/VL pair |
| 2354-2355 | Protein | Comp25 TL1A VH/VL pair |
| 2356-2357 | Protein | Comp26 TL1A VH/VL pair |
| 2358-2359 | Protein | Comp27 TL1A VH/VL pair |
| 2360-2361 | Protein | Comp28 TL1A VH/VL pair |
| 2362-2363 | Protein | Comp29 TL1A VH/VL pair |
| 2364-2365 | Protein | Comp30 IL23p19 VH/VL pair |
| 2366-2367 | Protein | Comp31 IL23p19 VH/VL pair |
| 2368-2369 | Protein | Comp32 IL23p19 VH/VL pair |
| 2370-2371 | Protein | Comp33 IL23p19 VH/VL pair |
| 2372-2373 | Protein | Comp34 IL23p19 VH/VL pair |
| 2374-2375 | Protein | Comp35 IL23p19 VH/VL pair |
| 2376-2377 | Protein | Comp36 IL23p19 VH/VL pair |
| 2378-2379 | Protein | Comp37 IL23p19 VH/VL pair |

### EXAMPLES

### Example 1: TL1A Binding Domains

### 1A: Novel TL1A Binding Domains

[0549] Novel mouse and rat anti-human TL1A binding domains were generated utilizing a single plasma B-cell antibody discovery platform from Single Cell Technologies. The binding domains were then humanized using string content optimization (see, e.g., U.S. Pat. No. 7,657,380). Exemplary humanized TL1A binding domains along with their CDRs are depicted in Tables 7-10.

### 1B: Superhumanized and Affinity Enhanced TL1A Binding Domains

[0550] As will be further described in Example 5, anti-TL1A clone 041 was engineered for enhanced affinity and superhumanized. Affinity maturation was performed using a phage display high-throughput screening approach in which a library of antibody variants was subjected to iterative binding selections to enrich for higher-affinity binders. Next-generation sequencing (NGS) was used to tabulate variant frequencies before and after selection, enabling calculation of enrichment scores based on changes in relative abundance. Variants exhibiting positive enrichment were identified as candidates with improved binding properties, and enrichment calculations were optionally integrated with protein language model-derived scores to further prioritize beneficial substitutions. Superhumanization to reduce potential immunogenicity was performed mostly as in Bernett et al. (2010) J. Mol. Biol. 396(5):1474-1490 with some modifications to incorporate HLA loading probabilities from MixMHC2pred (Racle et al. (2023) Immunity 56(6):1359-1375) for identifying potentially immunogenic peptide sequences for further engineering. Sequences for novel engineered VH and VL variants are provided in SEQ ID NOS: 1427-1823 and 2316-2330 (VH) and 1824-1923 (VL). Sequences for superhumanized and affinity-engineered variable heavy domain from anti-TL1A clone 041 are provided in SEQ ID NOS: 1427-1823 and 2316-2330. It should be noted that the variable heavy domains can be paired with any of the 041 variable light domains. Sequences for superhumanized and affinity-engineered variable light domain from anti-TL1A clone 041 are provided in SEQ ID NOS: 1824-1923. It should be noted that the variable heavy domains can be paired with any of the 041 variable heavy domains. Sequences for exemplary engineered VH/VL pairs are depicted in Table 22. Table 22 depicts the sequences for illustrative superhumanized and affinity-optimized 041 VH/VL pairs. It should be noted that these pairs may be formatted as Fabs or as scFvs. Any of the VH variants may further include Q39E or Q39K substitutions, and any of the VL variants may further include Q38E or Q38K substitutions for use, e.g., in OrthoFab or charge-swap formats. Superhumanization substitutions include A120Q (Kabat) in the VL region framework 4. VH substitutions that contributed to improved TL1A binding include S53Y and H100V (Kabat) respectively in HCDR2 and HCDR3.

TABLE 22
041_H1.324_L1.27

| | Sequence | SEQ ID NO: |
|---|---|---|
| Variable heavy | QVQLVQSGAEVKKPGASVKVSCKVSGFPVTSYNVHWVRQAPGQGLEWMGVM | 1661 |
| (vh) domain | WYGGNTDYNSKFQGRVTMTRDTSTNTVYMELSSLRSEDTAVYYCARAGRYYH | |
| | DSNYYWDFPYWGQGTLVTVSS | |
| vhCDR1 | SYNVH | 102 |
| vhCDR2 | VMWYGGNTDYNSKFQG | 1924 |
| vhCDR3 | AGRYYHDSNYYWDFPY | 104 |
| Variable light | DIQMTQSPSSVSASVGDRVTITCRASEDIYSGLAWYQQKPGKSPKLLIYGASSLQ | 1204 |
| (vl) domain | DGVPSRFSGSGSGTDYTLTISSLQPEDFATYFCQEGLKSPYTFGQGTKLEIK | |
| VlCDR1 | RASEDIYSGLA | 106 |
| VlCDR2 | GASSLQD | 107 |
| VlCDR3 | QEGLKSPYT | 108 |

041_H1.447_L1.27

| | Sequence | SEQ ID NO: |
|---|---|---|
| Variable heavy | QVQLVQSGAEVKKPGASVKVSCKVSGFSVTRYNVHWVRQAPGQGLEWMGVM | 1200 |
| (vh) domain | WSGANTDYNSKFQGRVTMTRDTSTNTVYMELSSLRSEDTAVYYCARAGRYYVD | |
| | SNYYWDFPYWGQGTLVTVSS | |
| vhCDR1 | RYNVH | 1201 |
| vhCDR2 | VMWSGANTDYNSKFQG | 1202 |
| vhCDR3 | AGRYYVDSNYYWDFPY | 1203 |
| Variable light | DIQMTQSPSSVSASVGDRVTITCRASEDIYSGLAWYQQKPGKSPKLLIYGASSLQ | 1204 |
| (vl) domain | DGVPSRFSGSGSGTDYTLTISSLQPEDFATYFCQEGLKSPYTFGQGTKLEIK | |
| VlCDR1 | RASEDIYSGLA | 106 |
| VlCDR2 | GASSLQD | 107 |
| VlCDR3 | QEGLKSPYT | 108 |

041_H1.337_L1.27

| | Sequence | SEQ ID NO: |
|---|---|---|
| Variable heavy | QVQLVQSGAEVKKPGASVKVSCKVSGFSVTSYNVHWVRQAPGQGLEWMGVM | 1674 |
| (vh) domain | WYGGNTDYNSKFQGRVTMTRDTSTNTVYMELSSLRSEDTAVYYCARAGRYYV | |
| | DSNYYWDFPYWGQGTLVTVSS | |
| vhCDR1 | SYNVH | 102 |
| vhCDR2 | VMWYGGNTDYNSKFQG | 1924 |
| vhCDR3 | AGRYYVDSNYYWDFPY | 1203 |
| Variable light | DIQMTQSPSSVSASVGDRVTITCRASEDIYSGLAWYQQKPGKSPKLLIYGASSLQ | 1204 |
| (vl) domain | DGVPSRFSGSGSGTDYTLTISSLQPEDFATYFCQEGLKSPYTFGQGTKLEIK | |
| VlCDR1 | RASEDIYSGLA | 106 |
| VlCDR2 | GASSLQD | 107 |
| VlCDR3 | QEGLKSPYT | 108 |

041_H1.239_L1.27

| | Sequence | SEQ ID NO: |
|---|---|---|
| Variable heavy | QVQLVQSGAEVKKPGASVKVSCKVSGFSVTSYNVHWVRQAPGQGLEWMGVM | 2323 |
| (vh) domain | WRGGNTDYNSKFQGRVTMTRDTSTNTVYMELSSLRSEDTAVYYCARAGRYYH | |
| | DSNYYWDFPYWGQGTLVTVSS | |
| vhCDR1 | SYNVH | 102 |
| vhCDR2 | VMWRGGNTDYNSKFQG | 1926 |
| vhCDR3 | AGRYYHDSNYYWDFPY | 104 |
| Variable light | DIQMTQSPSSVSASVGDRVTITCRASEDIYSGLAWYQQKPGKSPKLLIYGASSLQ | 1204 |
| (vl) domain | DGVPSRFSGSGSGTDYTLTISSLQPEDFATYFCQEGLKSPYTFGQGTKLEIK | |
| VlCDR1 | RASEDIYSGLA | 106 |
| VlCDR2 | GASSLQD | 107 |
| VlCDR3 | QEGLKSPYT | 108 |

### 1C. Additional TL1A Binding Domains

[0551] VH, VL, and CDR sequences for additional TL1A binding domains which may find use in TL1A×IL23 bispecific antibodies are depicted in Table 23 and Table 44. As noted herein and is true for every sequence herein containing CDRs, the exact identification of the CDR locations may be slightly different depending on the numbering used as is shown in Table 3, and thus included herein are not only the CDRs that are underlined but also CDRs included within the VH and VL domains using other numbering systems. Furthermore, as for all the sequences in the Tables, these VH and VL sequences can be used either in a scFv format or in a Fab format.

TABLE 23

| | |
|---|---|
| Sequence | SEQ ID NO: |

TL1a Binding Domain of XENP53387

| | | |
|---|---|---|
| Variable Heavy | QVQLVQSGAEVKKPGASVKVSCKVSGFSVTRYNVHWVRQAPGQGLE | 1200 |
| (vh) Domain | WMGVMWSGANTDYNSKFQGRVTMTRDTSTNTVYMELSSLRSEDTAV | |
| | YYCARAGRYYVDSNYYWDFPYWGQGTLVTVSS | |
| vhCDR1 | RYNVH | 1201 |
| vhCDR2 | VMWSGANTDYNSKFQG | 1202 |
| vhCDR3 | AGRYYVDSNYYWDFPY | 1203 |
| Variable Light | DIQMTQSPSSVSASVGDRVTITCRASEDIYSGLAWYQQKPGKSPKLLIYG | 1204 |
| (vl) Domain | ASSLQDGVPSRFSGSGSGTDYTLTISSLQPEDFATYFCQEGLKSPYTFGQ | |
| | GTKLEIK | |
| vlCDR1 | RASEDIYSGLA | 1205 |
| vlCDR2 | GASSLQD | 1206 |
| vlCDR3 | QEGLKSPYT | 1207 |

Comp13

| | | |
|---|---|---|
| Variable Heavy | QVQLVQSGAEVKKPGASVKVSCKASGYDFTYYGISWVRQAPGQGLEW | 1208 |
| (vh) Domain | MGWISTYNGNTHYARMLQGRVTMTTDTSTRTAYMELRSLRSDDTAVYY | |
| | CARENYYGSGAYRGGMDVWGQGTTVTVSS | |
| vhCDR1 | YYGIS | 1209 |
| vhCDR2 | WISTYNGNTHYARMLQG | 1210 |
| vhCDR3 | ENYYGSGAYRGGMDV | 1211 |
| Variable Light | EIVLTQSPATLSLSPGERATLSCRASQSVSSYLAWYQQKPGQAPRLLIYDA | 1212 |
| (vl) Domain | SNRATGIPARFSGSGSGTDFTLTISSLEPEDFAVYYCQQRSNWPWTFGQG | |
| | TKVEIK | |
| vlCDR1 | RASQSVSSYLA | 1213 |
| v1CDR2 | DASNRAT | 1214 |
| v1CDR3 | QQRSNWPWT | 1215 |

Comp14

| | | |
|---|---|---|
| Variable Heavy | QVQLVQSGAEVKKPGASVKVSCKASGFDIQDTYMHWVKQRPGQGLEW | 1216 |
| (vh) Domain | MGRIDPASGHTKYDPKFQVRVTITRDTSTSTVYLELSSLRSEDTAVYYCA | |
| | RSGGLPDVWGQGTTVTVSS | |
| vhCDR1 | DTYMH | 1217 |
| vhCDR2 | RIDPASGHTKYDPKFQV | 1218 |
| vhCDR3 | SGGLPDV | 1219 |
| Variable Light | EIVLTQSPGTLSLSPGERATLSCRASSSVSYMYWYQQKPGQAPRPLIYATS | 1220 |
| (vl) Domain | NLASGIPDRFSGSGSGTDFTLTISRLEPEDFAVYYCQQWEGNPRTFGGGT | |
| | KLEIK | |
| vlCDR1 | RASSSVSYMY | 1221 |
| vlCDR2 | ATSNLAS | 1222 |
| vlCDR3 | QQWEGNPRT | 1223 |

Comp9

| | | |
|---|---|---|
| Variable Heavy | QVQLVQSGAEVKKPGASVKVSCKASGYTFTSYDINWVRQAPGQGLEW | 1224 |
| (vh) Domain | MGWLNPNSGYTGYAQKFQGRVTMTADRSTSTAYMELSSLRSEDTAVYY | |
| | CAREVPETAAFEYWGQGTLVTVSS | |
| vhCDR1 | SYDIN | 1225 |
| vhCDR2 | WLNPNSGYTGYAQKFQG | 1226 |
| vhCDR3 | EVPETAAFEY | 1227 |
| Variable Light | QSVLTQPPSVSGAPGQRVTISCTSSSSDIGAGLGVHWYQQLPGTAPKLLIE | 1228 |
| (vl) Domain | GYYNRPSGVPDRFSGSKSGTSASLTITGLLPEDEGDYYCQSWDGTLSAL | |
| | FGGGTKLTVL | |
| vlCDR1 | TSSSSDIGAGLGVH | 1229 |
| vlCDR2 | GYYNRPS | 1230 |
| vlCDR3 | QSWDGTLSAL | 1231 |

Comp15

| | | |
|---|---|---|
| Variable Heavy | EVQLVESGGGLVKPGGSLRLSCAASGFTFSNAWMTWVRQAPGKGLEW | 1232 |
| (vh) Domain | VGRIKSKIDAGTTDYAAPVKGRFTISRDDSKNTLYLQMNSLKTEDTAVY | |
| | YCTTDLGWGENYWGQGTLVTVSS | |
| vhCDR1 | NAWMT | 1233 |
| vhCDR2 | RIKSKIDAGTTDYAAPVKG | 1234 |
| vhCDR3 | DLGWGENY | 1235 |
| Variable Light | ENVLTQSPGTLSLSPGERATLSCRASQRVSSSYLVWYQQKPGQAPRLLIY | 1236 |
| (vl) Domain | GASSRATGIPDRFSGSGSGTDFTLTISRLEPEDFAVYYCQQYGSSPYTFGQ | |
| | GTKLEIK | |
| vlCDR1 | RASQRVSSSYLV | 1237 |
| v1CDR2 | GASSRAT | 1238 |
| vlCDR3 | QQYGSSPYT | 1239 |
| Variable Heavy | EVQLVQSGAEVKKPGASVKVSCKASGYTFTGYYMHWVRQAPGQGLEW | 1240 |
| (vh) Domain | MGWINPKSGGTNYAQKFQGRVTMTRDTSISTAYMELSRLISDDTAVYY | |
| | CATGGSFDAFDVWGQGTMVTVSS | |
| vhCDR1 | GYYMH | 1241 |
| vhCDR2 | WINPKSGGTNYAQKFQG | 1242 |
| vhCDR3 | GGSFDAFDV | 1243 |
| Variable Light | DIVMTQSPSSLSASVGDRVTITCRASQSISSYLNWYQQSPGKAPKILIYGA | 1244 |
| (vl) Domain | SRLQSGVPSRFSGSGSGTDFTLAISSLQPEDFATYYCQQGDNTPFTFGPGT | |
| | KLEIK | |
| vlCDR1 | RASQSISSYLN | 1245 |
| vlCDR2 | GASRLQS | 1246 |
| vlCDR3 | QQGDNTPFT | 1247 |

[0552] It should be noted that any of the sequences described in this Example 1 can further include the G44C and A100C substitutions (Kabat numbering), for example, for improving stability in the context of scFvs.

### Example 2: IL23 Binding Domains

### 2A: Affinity Enhanced IL23 Binding Domains

[0553] As will be further described in Example 5, anti-TL23 clone IL23-A was engineered for enhanced affinity. Affinity engineering was done through rational design. Sequences for such novel VH and VL variants are provided in SEQ ID NOS: 1927-2132 (VH) and 2133-2232 (VL). Sequences for affinity-engineered variable heavy domain from anti-IL23 clone IL23-A are provided in SEQ ID NOS: 1927-2132. It should be noted that the variable heavy domains can be paired with any of the IL23-A variable light domains. Sequences for affinity-engineered variable light domain from anti-TL23 clone IL23-A are provided in SEQ ID NOS: 2133-2232. It should be noted that the variable heavy domains can be paired with any of the IL23-A variable heavy domains. Sequences for exemplary affinity-optimized IL23-A VH/VL pairs are depicted in Table 24. It should be noted that these pairs may be formatted as Fabs or as scFvs. Any of the VH variants may further include Q39E or Q39K substitutions, and any of the VL variants may further include Q38E or Q38K substitutions for use, e.g., in OrthoFab or charge-swap formats. VL substitutions that contributed to improved IL23 binding include T66V and H105Y (Kabat) respectively in LCDR2 and LCDR3.

TABLE 24

| | |
|---|---|
| sequence | SEQ ID NO: |

IL23-A_H1_L1.117

| | | |
|---|---|---|
| Variable heavy | QVQLVQSGAEVKKPGSSVKVSCKASGYTFTDQTIHWMRQAPGQGL | 179 |
| (vh) domain | EWIGYIYPRDDSPKYNENFKGKVTITADKSTSTAYMELSSLRSEDTA | |
| | VYYCAIPDRSGYAWFIYWGQGTLVTVSS | |
| vhCDR1 | DQTIH | 180 |
| vhCDR2 | YIYPRDDSPKYNENFKG | 181 |
| vhCDR3 | PDRSGYAWFIY | 182 |
| Variable light | DIQMTQSPSSLSASVGDRVTITCKASRDVAIAVAWYQQKPGKVPKLL | 1248 |
| (vl) domain | IYWASVRHTGVPSRFSGSGSRTDFTLTISSLQPEDVADYFCYQYSSYP | |
| | FTFGSGTKLEIK | |
| vlCDR1 | KASRDVAIAVA | 184 |
| vlCDR2 | WASVRHT | 1249 |
| vlCDR3 | YQYSSYPFT | 1250 |

IL23-A_H1.187_L1.116

| | | |
|---|---|---|
| Variable heavy | QVQLVQSGAEVKKPGSSVKVSCKASGYTFTDQTIHWMRQAPGQGL | 2113 |
| (vh) domain | EWIGYIYPRDDSPKYNENFKGKVTITADKSTSTAYMELSSLRSEDTAV | |
| | YYCAIPDRSGYAFFIYWGQGTLVTVSS | |
| vhCDR1 | DQTIH | 180 |
| vhCDR2 | YIYPRDDSPKYNENFKG | 181 |
| vhCDR3 | PDRSGYAFFIY | 2236 |
| Variable light | DIQMTQSPSSLSASVGDRVTITCKASRDVAIAVAWYQQKPGKVPKLLI | 2231 |
| (vl) domain | YWASQRHTGVPSRFSGSGSRTDFTLTISSLQPEDVADYFCYQYSSYPF | |
| | TFGSGTKLEIK | |
| vICDR1 | KASRDVAIAVA | 184 |
| vICDR2 | WASQRHT | 2238 |
| vlCDR3 | YQYSSYPFT | 1250 |

IL23-A_H1.41_L1.117

| | | |
|---|---|---|
| Variable heavy | QVQLVQSGAEVKKPGSSVKVSCKASGYTFTDQTLHWMRQAPGQGL | 1967 |
| (vh) domain | EWIGYIYPRDDSPKYNENFKGKVTITADKSTSTAYMELSSLRSEDTAV | |
| | YYCAIPDRSGYAWFIYWGQGTLVTVSS | |
| vhCDR1 | DQTLH | 2239 |
| vhCDR2 | YIYPRDDSPKYNENFKG | 181 |
| vhCDR3 | PDRSGYAWFIY | 182 |
| Variable light | DIQMTQSPSSLSASVGDRVTITCKASRDVAIAVAWYQQKPGKVPKLLI | 1248 |
| (vl) domain | YWASVRHTGVPSRFSGSGSRTDFTLTISSLQPEDVADYFCYQYSSYPF | |
| | TFGSGTKLEIK | |
| vlCDR1 | KASRDVAIAVA | 184 |
| vlCDR2 | WASVRHT | 1249 |
| vlCDR3 | YQYSSYPFT | 1250 |

### 2B: Additional IL23 Binding Domains

[0554] VH, VL, and CDR sequences for additional IL23 binding domains which may find use in TL1A×IL23 bispecific antibodies are depicted in Table 25 and Table 44. As noted herein and is true for every sequence herein containing CDRs, the exact identification of the CDR locations may be slightly different depending on the numbering used as is shown in Table 3, and thus included herein are not only the CDRs that are underlined but also CDRs included within the VH and VL domains using other numbering systems. Furthermore, as for all the sequences in the Tables, these VH and VL sequences can be used either in a scFv format or in a Fab format.

TABLE 25

| | |
|---|---|
| Sequence | SEQ ID NO: |

IL23 Binding Domain of XENP53387

| | | |
|---|---|---|
| Variable | QVQLVQSGAEVKKPGSSVKVSCKASGYTFTDQTIHWMRQAPGQGLEWIGYI | 179 |
| Heavy (vh) | YPRDDSPKYNENFKGKVTITADKSTSTAYMELSSLRSEDTAVYYCAIPDRSGY | |
| Domain | AWFIYWGQGTLVTVSS | |
| vhCDR1 | DQTIH | 180 |
| vhCDR2 | YIYPRDDSPKYNENFKG | 181 |
| vhCDR3 | PDRSGYAWFIY | 182 |
| Variable | DIQMTQSPSSLSASVGDRVTITCKASRDVAIAVAWYQQKPGKVPKLLIYWAS | 1248 |
| Light (v1) | VRHTGVPSRFSGSGSRTDFTLTISSLQPEDVADYFCYQYSSYPFTFGSGTKLEI | |
| Domain | K | |
| vlCDR1 | KASRDVAIAVA | 184 |
| vlCDR2 | WASVRHT | 1249 |
| vlCDR3 | YQYSSYPFT | 1250 |

Comp5

| | | |
|---|---|---|
| Variable | EVQLVQSGAEVKKPGESLKISCKGSGYSFSNYWIGWVRQMPGKGLEWMGII | 1251 |
| Heavy (vh) | DPSNSYTRYSPSFQGQVTISADKSISTAYLQWSSLKASDTAMYYCARWYYKP | |
| Domain | FDVWGQGTLVTVSS | |
| vhCDR1 | NYWIG | 1252 |
| vhCDR2 | IIDPSNSYTRYSPSFQG | 1253 |
| vhCDR3 | WYYKPFDV | 1254 |
| Variable | QSVLTQPPSVSGAPGQRVTISCTGSSSNIGSGYDVHWYQQLPGTAPKLLIYGN | 1255 |
| Light (vl) | SKRPSGVPDRFSGSKSGTSASLAITGLQSEDEADYYCASWTDGLSLVVFGGG | |
| Domain | TKLTVL | |
| vlCDR1 | TGSSSNIGSGYDVH | 1256 |
| vlCDR2 | GNSKRPS | 1257 |
| vlCDR3 | ASWTDGLSLVV | 1258 |

Comp6

| | | |
|---|---|---|
| Variable | QVQLVQSGAEVKKPGASVKVSCKASGYIFITYWMTWVRQAPGQGLEWMGQ | 1259 |
| Heavy (vh) | IFPASGSADYNEKFEGRVTMTTDTSTSTAYMELRSLRSDDTAVYYCARGGGG | |
| Domain | FAYWGQGTLVTVSS | |
| vhCDR1 | TYWMT | 1260 |
| vhCDR2 | QIFPASGSADYNEKFEG | 1261 |
| vhCDR3 | GGGGFAY | 1262 |
| Variable | DIQMTQSPSSLSASVGDRVTITCRTSENIYSYLAWYQQKPGKAPKLLIYNAKT | 1263 |
| Light (vl) | LAEGVPSRFSGSGSGTDFTLTISSLQPEDFATYYCQHHYGIPFTFGQGTKVEIK | |
| Domain | | |
| vlCDR1 | RTSENIYSYLA | 1264 |
| vlCDR2 | NAKTLAE | 1265 |
| vlCDR3 | QHHYGIPFT | 1266 |
| Variable | QVQLVQSGAEVKKPGSSVKVSCKASGYKFTRYVMHWVRQAPGQGLEWMG | 1267 |
| Heavy (vh) | YINPYNDGTNYNEKFKGRVTITADKSTSTAYMELSSLRSEDTAVYYCARNWD | |
| Domain | TGLWGQGTTVTVSS | |
| vhCDR1 | RYVMH | 1268 |
| vhCDR2 | YINPYNDGTNYNEKFKG | 1269 |
| vhCDR3 | NWDTGL | 1270 |
| Variable | DIQMTQSPSSLSASVGDRVTITCKASDHILKFLTWYQQKPGKAPKLLIYGATS | 1271 |
| Light (vl) | LETGVPSRFSGSGSGTDFTLTISSLQPEDFATYYCQMYWSTPFTFGGGTKVEIK | |
| Domain | | |
| vlCDR1 | KASDHILKFLT | 1272 |
| vlCDR2 | GATSLET | 1273 |
| vlCDR3 | QMYWSTPFT | 1274 |

Comp7

| | | |
|---|---|---|
| Variable | QVQLVESGGGVVQPGRSLRLSCAASGFTFSSYGMHWVRQAPGKGLEWVAVI | 1275 |
| Heavy (vh) | WYDGSNEYYADSVKGRFTISRDNSKNTLYLQMNSLRAEDTAVYYCARDRGY | |
| Domain | TSSWYPDAFDIWGQGTMVTVSS | |
| vhCDR1 | SYGMH | 1276 |
| vhCDR2 | VIWYDGSNEYYADSVKG | 1277 |
| vhCDR3 | DRGYTSSWYPDAFDI | 1278 |
| Variable | QSVLTQPPSVSGAPGQRVTISCTGSSSNTGAGYDVHWYQQVPGTAPKLLIYG | 1279 |
| Light (vl) | SGNRPSGVPDRFSGSKSGTSASLAITGLQAEDEADYYCQSYDSSLSGWVFGG | |
| Domain | GTRLTVL | |
| vlCDR1 | TGSSSNTGAGYDVH | 1280 |
| vlCDR2 | GSGNRPS | 1281 |
| vlCDR3 | QSYDSSLSGWV | 1282 |
| Variable | EVQLLESGGGLVQPGGSLRLSCAASGFTFSAYGMDWVRQAPGKGLEWVSSI | 1283 |
| Heavy (vh) | SPSGGRTKYADSVKGRFTISRDNSKNTLYLQMNSLRAEDTAVYYCAKDLGGG | |
| Domain | YYYYYGMDVWGQGTLVTVSS | |
| vhCDR1 | AYGMD | 1284 |
| vhCDR2 | SISPSGGRTKYADSVKG | 1285 |
| vhCDR3 | DLGGGYYYYYGMDV | 1286 |
| Variable | QYELTQPASVSGSPGQSITISCTGTSSDVGGYNYVSWYQQHPGKAPKLMIYE | 1287 |
| Light (vl) | VSNRPSGVSNRFSGSKSGNTASLTISGLQAEDEADYYCSSYTSSSTLFYVFGT | |
| Domain | GTKVTVL | |
| vlCDR1 | TGTSSDVGGYNYVS | 1288 |
| vlCDR2 | EVSNRPS | 1289 |
| vlCDR3 | SSYTSSSTLFYV | 1290 |

[0555] It should be noted that any of the sequences described in this Example 2 can further include the G44C and A100C substitutions (Kabat numbering), for example, for improving stability in the context of scFvs.

### Example 3: Engineering TL1a×IL23 bsAbs

[0556] A number of formats were conceived and engineered for the production of TL1A×IL23 bispecific antibodies which are depicted in FIG. 1. Exemplary formats are further outlined below.

### 3A: 1+1 Fab-scFv-Fc Format

[0557] One exemplary format utilizing Fab domains and scFv is the 1+1 Fab-scFv-Fc format (depicted schematically in FIG. 1, Panel A) which comprises a first monomer comprising a single-chain Fv (“scFv”) with a first antigen binding specificity covalently attached to a first heterodimeric Fc domain i.e., scFv-domain linker-CH2-CH3, a second monomer comprising a heavy chain i.e., VH-CH1-hinge-CH2-CH3, wherein the CH2-CH3 is a second heterodimeric Fc domain complementary to the first heterodimeric Fc domain, and a light chain (LC) transfected separately so that a Fab domain having a second antigen binding specificity is formed with the variable heavy domain. Any number of heterodimerization approaches as is known in the art could find use in this (and other) bispecific formats, in combination with any number of approaches for purifying heterodimers from contaminating homodimers. Any of the number of linkers as is known in the art may find use in linking the VH and VL domains of the scFv. Finally, it may be useful to maximize serum half-life of the bsAbs, and any of the number of half-life extending variants as is known in the art may find use in these bsAbs.

[0558] In particular, the 1+1 Fab-scFv-Fc bsAbs may utilize Backbones 1 (SEQ ID NOS: 58 and 58) or 11 (SEQ ID NOS: 78 and 79). The backbones utilize the L368D/K370S (on the HC): S364K/E357Q (on the scFv-Fc) heterodimeric Fc variants. The HC side further includes pI variants N208D/Q295E/N384D/Q418E/N421D to increase negative charge of the heavy chain. The scFv utilizes a positively charged (GKPGS)₄ (SEQ ID NO: 16) linker between the VH and VL domains to increase positive charge of the scFv-Fc chain. Collectively, these two approaches enable easy purification of heterodimers from contaminating homodimers. The FcγR ablation variants utilized in this platform are the E233P/L234V/L235A/G236_/S267K substitutions on both the HC and the scFv-Fc monomers. In some cases, bsAbs includes the M428L/N434S half-life extension variants. Sequences for illustrative TL1A×IL23 bsAbs in the 1+1 Fab-scFv-Fc format are provided in Table 26. CDRs are underlined and slashes indicate the border(s) between the variable regions, linkers, Fe regions, and constant domains. The scFv domain has orientation (N- to C-terminus) of V_{H}-scFv linker-V_{L}, although this can be reversed. It should be noted that the Chain 2 sequences include as a domain linker the sequence/GKPGSGKPGSGKPGSGKPGS/(SEQ ID NO: 892); however, this linker can be replaced with any domain linker include any of the “useful domain linkers” of Table 4. It should be noted that the TL1A×IL23 bsAbs can utilize variable region, Fc region, and constant domain sequences that are 90, 95, 98 and 9900 identical (as defined herein), and/or contain from 1, 2, 3, 4, 5, 6, 7, 8, 9 or 10 amino acid substitutions. In addition, each sequence outlined herein can include or exclude the M428L/N434S or any other half-life extension variants and/or any other ablation variant (as depicted in Table 1) in one or preferably both Fc domains Additionally, each sequence can utilize any other heterodimeric Fc variant as depicted in Tables 12-17.

TABLE 26

| | SEQ ID NO \| Antigen | | | | | |
|---|---|---|---|---|---|---|
| Xencor ID | Chain 1 | | Chain 2 | | Chain 3 | |
| XENP48732 | 186 | IL23 | 187 | TL1A | 188 | IL23 |
| XENP48733 | 189 | IL23 | 190 | TL1A | 191 | IL23 |
| XENP48734 | 192 | IL23 | 193 | TL1A | 194 | IL23 |
| XENP48735 | 195 | IL23 | 196 | TL1A | 197 | IL23 |
| XENP48736 | 198 | IL23 | 199 | TL1A | 200 | IL23 |
| XENP48737 | 201 | IL23 | 202 | TL1A | 203 | IL23 |
| XENP48738 | 204 | IL23 | 205 | TL1A | 206 | IL23 |
| XENP48739 | 207 | IL23 | 208 | TL1A | 209 | IL23 |
| XENP48740 | 210 | IL23 | 211 | TL1A | 212 | IL23 |
| XENP48741 | 213 | IL23 | 214 | TL1A | 215 | IL23 |
| XENP48742 | 216 | IL23 | 217 | TL1A | 218 | IL23 |
| XENP48743 | 219 | IL23 | 220 | TL1A | 221 | IL23 |
| XENP48744 | 222 | TL1A | 223 | IL23 | 224 | TL1A |
| XENP48745 | 225 | TL1A | 226 | IL23 | 227 | TL1A |
| XENP48746 | 228 | TL1A | 229 | IL23 | 230 | TL1A |
| XENP48747 | 231 | TL1A | 232 | IL23 | 233 | TL1A |
| XENP48748 | 234 | TL1A | 235 | IL23 | 236 | TL1A |
| XENP48749 | 237 | TL1A | 238 | IL23 | 239 | TL1A |
| XENP48750 | 240 | TL1A | 241 | IL23 | 242 | TL1A |
| XENP48751 | 243 | TL1A | 244 | IL23 | 245 | TL1A |
| XENP48752 | 246 | TL1A | 247 | IL23 | 248 | TL1A |
| XENP48753 | 249 | TL1A | 250 | IL23 | 251 | TLIA |
| XENP48754 | 252 | TL1A | 253 | IL23 | 254 | TLIA |
| XENP48755 | 255 | TLIA | 256 | IL23 | 257 | TLIA |
| XENP49328 | 258 | IL23 | 259 | TL1A | 260 | IL23 |
| XENP49329 | 261 | IL23 | 262 | TL1A | 263 | IL23 |
| XENP49330 | 264 | IL23 | 265 | TL1A | 266 | IL23 |
| XENP49331 | 267 | IL23 | 268 | TL1A | 269 | IL23 |
| XENP49332 | 270 | IL23 | 271 | TL1A | 272 | IL23 |
| XENP49333 | 273 | IL23 | 274 | TL1A | 275 | IL23 |
| XENP49334 | 276 | TLIA | 277 | IL23 | 278 | TL1A |
| XENP49335 | 279 | TLIA | 280 | IL23 | 281 | TL1A |
| XENP49336 | 282 | TL1A | 283 | IL23 | 284 | TL1A |
| XENP49337 | 285 | TL1A | 286 | IL23 | 287 | TLIA |
| XENP49338 | 288 | TL1A | 289 | IL23 | 290 | TLIA |
| XENP49339 | 291 | TL1A | 292 | IL23 | 293 | TLIA |
| XENP49699 | 294 | IL23 | 295 | TL1A | 296 | IL23 |
| XENP49700 | 297 | IL23 | 298 | TL1A | 299 | IL23 |
| XENP49701 | 300 | IL23 | 301 | TL1A | 302 | IL23 |
| XENP49702 | 303 | IL23 | 304 | TL1A | 305 | IL23 |
| XENP49703 | 306 | IL23 | 307 | TL1A | 308 | IL23 |
| XENP49704 | 309 | IL23 | 310 | TL1A | 311 | IL23 |
| XENP50284 | 312 | IL23 | 313 | TL1A | 314 | IL23 |
| XENP50774 | 315 | TL1A | 316 | IL23 | 317 | TL1A |
| XENP50776 | 318 | IL23 | 319 | TL1A | 320 | IL23 |
| XENP51725 | 321 | IL23 | 322 | TL1A | 323 | IL23 |
| XENP52371 | 324 | TL1A | 325 | IL23 | 326 | TL1A |
| XENP52372 | 327 | TL1A | 328 | IL23 | 329 | TL1A |
| XENP52373 | 330 | TL1A | 331 | IL23 | 332 | TL1A |
| XENP52374 | 333 | TL1A | 334 | IL23 | 335 | TL1A |
| XENP52375 | 336 | TL1A | 337 | IL23 | 338 | TL1A |
| XENP52376 | 339 | TL1A | 340 | IL23 | 341 | TL1A |
| XENP52377 | 342 | TL1A | 343 | IL23 | 344 | TL1A |
| XENP52378 | 345 | TL1A | 346 | IL23 | 347 | TL1A |
| XENP52379 | 348 | TL1A | 349 | IL23 | 350 | TL1A |
| XENP52380 | 351 | TL1A | 352 | IL23 | 353 | TL1A |
| XENP52381 | 354 | TL1A | 355 | IL23 | 356 | TL1A |
| XENP52382 | 357 | TL1A | 358 | IL23 | 359 | TL1A |
| XENP52383 | 360 | TL1A | 361 | IL23 | 362 | TL1A |
| XENP52384 | 363 | TL1A | 364 | IL23 | 365 | TL1A |
| XENP52385 | 366 | TL1A | 367 | IL23 | 368 | TL1A |
| XENP52386 | 369 | TLIA | 370 | IL23 | 371 | TL1A |
| XENP52387 | 372 | TL1A | 373 | IL23 | 374 | TL1A |
| XENP52388 | 375 | TL1A | 376 | IL23 | 377 | TL1A |
| XENP52389 | 378 | TL1A | 379 | IL23 | 380 | TL1A |
| XENP52390 | 381 | TL1A | 382 | IL23 | 383 | TL1A |
| XENP52391 | 384 | TL1A | 385 | IL23 | 386 | TL1A |
| XENP52392 | 387 | TL1A | 388 | IL23 | 389 | TL1A |
| XENP52393 | 390 | TL1A | 391 | IL23 | 392 | TL1A |
| XENP52394 | 393 | TL1A | 394 | IL23 | 395 | TL1A |
| XENP52395 | 396 | TL1A | 397 | IL23 | 398 | TL1A |
| XENP52396 | 399 | TL1A | 400 | IL23 | 401 | TL1A |
| XENP52432 | 402 | IL23 | 403 | TL1A | 404 | IL23 |
| XENP52433 | 405 | IL23 | 406 | TL1A | 407 | IL23 |
| XENP52438 | 408 | TL1A | 409 | IL23 | 410 | TL1A |
| XENP52439 | 411 | TL1A | 412 | IL23 | 413 | TLIA |
| XENP52440 | 414 | TL1A | 415 | IL23 | 416 | TL1A |
| XENP52441 | 417 | TL1A | 418 | IL23 | 419 | TL1A |
| XENP52442 | 420 | TL1A | 421 | IL23 | 422 | TL1A |
| XENP52443 | 423 | TL1A | 424 | IL23 | 425 | TL1A |
| XENP52444 | 426 | TL1A | 427 | IL23 | 428 | TL1A |
| XENP52445 | 429 | TL1A | 430 | IL23 | 431 | TL1A |
| XENP52446 | 432 | TL1A | 433 | IL23 | 434 | TL1A |
| XENP52447 | 435 | TL1A | 436 | IL23 | 437 | TL1A |
| XENP52448 | 438 | TL1A | 439 | IL23 | 440 | TL1A |
| XENP52449 | 441 | TLIA | 442 | IL23 | 443 | TL1A |
| XENP52450 | 444 | TL1A | 445 | IL23 | 446 | TLIA |
| XENP52451 | 447 | TL1A | 448 | IL23 | 449 | TL1A |
| XENP52452 | 450 | TL1A | 451 | IL23 | 452 | TL1A |
| XENP52453 | 453 | TL1A | 454 | IL23 | 455 | TL1A |
| XENP52454 | 456 | TL1A | 457 | IL23 | 458 | TL1A |
| XENP52455 | 459 | TL1A | 460 | IL23 | 461 | TL1A |
| XENP52456 | 462 | TL1A | 463 | IL23 | 464 | TL1A |
| XENP52457 | 465 | TL1A | 466 | IL23 | 467 | TL1A |
| XENP52458 | 468 | TL1A | 469 | IL23 | 470 | TL1A |
| XENP52459 | 471 | TL1A | 472 | IL23 | 473 | TL1A |
| XENP52460 | 474 | TL1A | 475 | IL23 | 476 | TL1A |
| XENP52461 | 477 | TL1A | 478 | IL23 | 479 | TL1A |
| XENP52462 | 480 | TL1A | 481 | IL23 | 482 | TL1A |
| XENP52463 | 483 | TL1A | 484 | IL23 | 485 | TL1A |
| XENP52464 | 486 | TL1A | 487 | IL23 | 488 | TL1A |
| XENP52465 | 489 | TL1A | 490 | IL23 | 491 | TL1A |
| XENP52466 | 492 | TL1A | 493 | IL23 | 494 | TL1A |
| XENP52467 | 495 | TL1A | 496 | IL23 | 497 | TL1A |
| XENP52468 | 498 | TL1A | 499 | IL23 | 500 | TL1A |
| XENP52469 | 501 | TL1A | 502 | IL23 | 503 | TL1A |
| XENP52470 | 504 | TL1A | 505 | IL23 | 506 | TL1A |
| XENP52471 | 507 | TL1A | 508 | IL23 | 509 | TL1A |
| XENP52472 | 510 | TL1A | 511 | IL23 | 512 | TL1A |
| XENP52473 | 513 | TL1A | 514 | IL23 | 515 | TL1A |
| XENP52474 | 516 | TL1A | 517 | IL23 | 518 | TL1A |
| XENP52475 | 519 | TL1A | 520 | IL23 | 521 | TL1A |
| XENP52476 | 522 | TL1A | 523 | IL23 | 524 | TL1A |
| XENP52477 | 525 | TL1A | 526 | IL23 | 527 | TL1A |
| XENP52478 | 528 | TL1A | 529 | IL23 | 530 | TL1A |
| XENP52479 | 531 | TL1A | 532 | IL23 | 533 | TL1A |
| XENP52480 | 534 | TL1A | 535 | IL23 | 536 | TL1A |
| XENP52481 | 537 | TL1A | 538 | IL23 | 539 | TL1A |
| XENP52482 | 540 | TL1A | 541 | IL23 | 542 | TL1A |
| XENP52483 | 543 | TL1A | 544 | IL23 | 545 | TL1A |
| XENP52484 | 546 | TL1A | 547 | IL23 | 548 | TL1A |
| XENP52485 | 549 | TL1A | 550 | IL23 | 551 | TL1A |
| XENP52486 | 552 | TL1A | 553 | IL23 | 554 | TL1A |
| XENP52487 | 555 | TL1A | 556 | IL23 | 557 | TL1A |
| XENP52488 | 558 | TL1A | 559 | IL23 | 560 | TL1A |
| XENP52489 | 561 | TL1A | 562 | IL23 | 563 | TL1A |
| XENP52490 | 564 | TL1A | 565 | IL23 | 566 | TL1A |
| XENP52491 | 567 | TL1A | 568 | IL23 | 569 | TL1A |
| XENP52492 | 570 | TL1A | 571 | IL23 | 572 | TL1A |
| XENP52493 | 573 | TL1A | 574 | IL23 | 575 | TL1A |
| XENP52494 | 576 | TL1A | 577 | IL23 | 578 | TL1A |
| XENP52495 | 579 | TL1A | 580 | IL23 | 581 | TL1A |
| XENP52496 | 582 | TL1A | 583 | IL23 | 584 | TL1A |
| XENP52497 | 585 | TL1A | 586 | IL23 | 587 | TL1A |
| XENP52498 | 588 | TL1A | 589 | IL23 | 590 | TL1A |
| XENP52499 | 591 | TL1A | 592 | IL23 | 593 | TL1A |
| XENP52500 | 594 | TL1A | 595 | IL23 | 596 | TL1A |
| XENP52501 | 597 | TL1A | 598 | IL23 | 599 | TL1A |
| XENP52502 | 600 | TL1A | 601 | IL23 | 602 | TL1A |
| XENP52503 | 603 | TL1A | 604 | IL23 | 605 | TL1A |
| XENP52504 | 606 | TL1A | 607 | IL23 | 608 | TL1A |
| XENP52505 | 609 | TL1A | 610 | IL23 | 611 | TL1A |
| XENP52506 | 612 | TL1A | 613 | IL23 | 614 | TL1A |
| XENP52507 | 615 | TL1A | 616 | IL23 | 617 | TL1A |
| XENP52508 | 618 | TL1A | 619 | IL23 | 620 | TL1A |
| XENP52509 | 621 | TL1A | 622 | IL23 | 623 | TL1A |
| XENP52510 | 624 | TL1A | 625 | IL23 | 626 | TL1A |
| XENP52511 | 627 | TL1A | 628 | IL23 | 629 | TL1A |
| XENP52528 | 630 | TL1A | 631 | IL23 | 632 | TL1A |
| XENP52529 | 633 | TL1A | 634 | IL23 | 635 | TL1A |
| XENP52530 | 636 | TL1A | 637 | IL23 | 638 | TL1A |
| XENP52531 | 639 | TL1A | 640 | IL23 | 641 | TL1A |
| XENP52532 | 642 | TL1A | 643 | IL23 | 644 | TL1A |
| XENP52533 | 645 | TL1A | 646 | IL23 | 647 | TL1A |
| XENP52534 | 648 | TL1A | 649 | IL23 | 650 | TL1A |
| XENP52535 | 651 | TL1A | 652 | IL23 | 653 | TL1A |
| XENP52536 | 654 | TL1A | 655 | IL23 | 656 | TL1A |
| XENP52537 | 657 | TLIA | 658 | IL23 | 659 | TL1A |
| XENP52538 | 660 | TL1A | 661 | IL23 | 662 | TL1A |
| XENP52850 | 663 | IL23 | 664 | TL1A | 665 | IL23 |
| XENP52851 | 666 | IL23 | 667 | TL1A | 668 | IL23 |
| XENP52852 | 669 | IL23 | 670 | TL1A | 671 | IL23 |
| XENP52853 | 672 | IL23 | 673 | TL1A | 674 | IL23 |
| XENP52854 | 675 | IL23 | 676 | TL1A | 677 | IL23 |
| XENP53110 | 678 | IL23 | 679 | TL1A | 680 | IL23 |
| XENP53111 | 681 | IL23 | 682 | TL1A | 683 | IL23 |
| XENP53112 | 684 | IL23 | 685 | TL1A | 686 | IL23 |
| XENP53113 | 687 | IL23 | 688 | TL1A | 689 | IL23 |
| XENP53114 | 690 | IL23 | 691 | TL1A | 692 | IL23 |
| XENP53115 | 693 | IL23 | 694 | TL1A | 695 | IL23 |
| XENP53116 | 696 | IL23 | 697 | TL1A | 698 | IL23 |
| XENP53117 | 699 | IL23 | 700 | TL1A | 701 | IL23 |
| XENP53118 | 702 | IL23 | 703 | TL1A | 704 | IL23 |
| XENP53119 | 705 | IL23 | 706 | TL1A | 707 | IL23 |
| XENP53194 | 708 | IL23 | 709 | TL1A | 710 | IL23 |
| XENP53195 | 711 | IL23 | 712 | TL1A | 713 | IL23 |
| XENP53196 | 714 | IL23 | 715 | TL1A | 716 | IL23 |
| XENP53197 | 717 | IL23 | 718 | TL1A | 719 | IL23 |
| XENP53198 | 720 | IL23 | 721 | TL1A | 722 | IL23 |
| XENP53199 | 723 | IL23 | 724 | TL1A | 725 | IL23 |
| XENP53200 | 726 | IL23 | 727 | TL1A | 728 | IL23 |
| XENP53201 | 729 | IL23 | 730 | TL1A | 731 | IL23 |
| XENP53202 | 732 | IL23 | 733 | TL1A | 734 | IL23 |
| XENP53203 | 735 | IL23 | 736 | TL1A | 737 | IL23 |
| XENP53204 | 738 | IL23 | 739 | TL1A | 740 | IL23 |
| XENP53205 | 741 | IL23 | 742 | TL1A | 743 | IL23 |
| XENP53206 | 744 | IL23 | 745 | TL1A | 746 | IL23 |
| XENP53207 | 747 | IL23 | 748 | TL1A | 749 | IL23 |
| XENP53208 | 750 | IL23 | 751 | TL1A | 752 | IL23 |
| XENP53209 | 753 | IL23 | 754 | TL1A | 755 | IL23 |
| XENP53210 | 756 | IL23 | 757 | TL1A | 758 | IL23 |
| XENP53211 | 759 | IL23 | 760 | TL1A | 761 | IL23 |
| XENP53212 | 762 | IL23 | 763 | TL1A | 764 | IL23 |
| XENP53213 | 765 | IL23 | 766 | TL1A | 767 | IL23 |
| XENP53214 | 768 | IL23 | 769 | TL1A | 770 | IL23 |
| XENP53215 | 771 | IL23 | 772 | TL1A | 773 | IL23 |
| XENP53216 | 774 | IL23 | 775 | TL1A | 776 | IL23 |
| XENP53217 | 777 | IL23 | 778 | TL1A | 779 | IL23 |
| XENP53218 | 780 | IL23 | 781 | TL1A | 782 | IL23 |
| XENP53219 | 783 | IL23 | 784 | TL1A | 785 | IL23 |
| XENP53220 | 786 | IL23 | 787 | TL1A | 788 | IL23 |
| XENP53221 | 789 | IL23 | 790 | TL1A | 791 | IL23 |
| XENP53222 | 792 | IL23 | 793 | TL1A | 794 | IL23 |
| XENP53223 | 795 | IL23 | 796 | TL1A | 797 | IL23 |
| XENP53224 | 798 | IL23 | 799 | TL1A | 800 | IL23 |
| XENP53225 | 801 | IL23 | 802 | TL1A | 803 | IL23 |
| XENP53226 | 804 | IL23 | 805 | TL1A | 806 | IL23 |
| XENP53227 | 807 | IL23 | 808 | TL1A | 809 | IL23 |
| XENP53228 | 810 | IL23 | 811 | TL1A | 812 | IL23 |
| XENP53229 | 813 | IL23 | 814 | TL1A | 815 | IL23 |
| XENP53230 | 816 | IL23 | 817 | TL1A | 818 | IL23 |
| XENP53231 | 819 | IL23 | 820 | TL1A | 821 | IL23 |
| XENP53232 | 822 | IL23 | 823 | TL1A | 824 | IL23 |
| XENP53233 | 825 | IL23 | 826 | TL1A | 827 | IL23 |
| XENP53234 | 828 | IL23 | 829 | TL1A | 830 | IL23 |
| XENP53235 | 831 | IL23 | 832 | TL1A | 833 | IL23 |
| XENP53236 | 834 | IL23 | 835 | TL1A | 836 | IL23 |
| XENP53237 | 837 | IL23 | 838 | TL1A | 839 | IL23 |
| XENP53238 | 840 | IL23 | 841 | TL1A | 842 | IL23 |
| XENP53239 | 843 | IL23 | 844 | TL1A | 845 | IL23 |
| XENP53240 | 846 | IL23 | 847 | TL1A | 848 | IL23 |
| XENP53241 | 849 | IL23 | 850 | TL1A | 851 | IL23 |
| XENP53242 | 852 | IL23 | 853 | TL1A | 854 | IL23 |
| XENP53243 | 855 | IL23 | 856 | TL1A | 857 | IL23 |
| XENP53244 | 858 | IL23 | 859 | TL1A | 860 | IL23 |
| XENP53245 | 861 | IL23 | 862 | TL1A | 863 | IL23 |
| XENP53246 | 864 | IL23 | 865 | TL1A | 866 | IL23 |
| XENP53247 | 867 | IL23 | 868 | TL1A | 869 | IL23 |
| XENP53248 | 870 | IL23 | 871 | TL1A | 872 | IL23 |
| XENP53249 | 873 | IL23 | 874 | TL1A | 875 | IL23 |
| XENP53250 | 876 | IL23 | 877 | TL1A | 878 | IL23 |
| XENP53251 | 879 | IL23 | 880 | TL1A | 881 | IL23 |
| XENP53252 | 882 | IL23 | 883 | TL1A | 884 | IL23 |
| XENP53253 | 885 | IL23 | 886 | TL1A | 887 | IL23 |
| XENP53254 | 888 | IL23 | 889 | TL1A | 890 | IL23 |
| XENP53255 | 891 | IL23 | 892 | TL1A | 893 | IL23 |
| XENP53256 | 894 | IL23 | 895 | TL1A | 896 | IL23 |
| XENP53257 | 897 | IL23 | 898 | TL1A | 899 | IL23 |
| XENP53258 | 900 | IL23 | 901 | TL1A | 902 | IL23 |
| XENP53259 | 903 | IL23 | 904 | TL1A | 905 | IL23 |
| XENP53260 | 906 | IL23 | 907 | TL1A | 908 | IL23 |
| XENP53261 | 909 | IL23 | 910 | TL1A | 911 | IL23 |
| XENP53262 | 912 | IL23 | 913 | TL1A | 914 | IL23 |
| XENP53263 | 915 | IL23 | 916 | TL1A | 917 | IL23 |
| XENP53282 | 918 | IL23 | 919 | TL1A | 920 | IL23 |
| XENP53283 | 921 | IL23 | 922 | TL1A | 923 | IL23 |
| XENP53284 | 924 | IL23 | 925 | TL1A | 926 | IL23 |
| XENP53285 | 927 | IL23 | 928 | TL1A | 929 | IL23 |
| XENP53286 | 930 | IL23 | 931 | TL1A | 932 | IL23 |
| XENP53287 | 933 | IL23 | 934 | TL1A | 935 | IL23 |
| XENP53288 | 936 | IL23 | 937 | TL1A | 938 | IL23 |
| XENP53289 | 939 | IL23 | 940 | TL1A | 941 | IL23 |
| XENP53290 | 942 | IL23 | 943 | TL1A | 944 | IL23 |
| XENP53291 | 945 | IL23 | 946 | TL1A | 947 | IL23 |
| XENP53292 | 948 | IL23 | 949 | TL1A | 950 | IL23 |
| XENP53293 | 951 | IL23 | 952 | TL1A | 953 | IL23 |
| XENP53294 | 954 | IL23 | 955 | TL1A | 956 | IL23 |
| XENP53295 | 957 | IL23 | 958 | TL1A | 959 | IL23 |
| XENP53296 | 960 | IL23 | 961 | TL1A | 962 | IL23 |
| XENP53297 | 963 | IL23 | 964 | TL1A | 965 | IL23 |
| XENP53298 | 966 | IL23 | 967 | TL1A | 968 | IL23 |
| XENP53299 | 969 | IL23 | 970 | TL1A | 971 | IL23 |
| XENP53300 | 972 | IL23 | 973 | TL1A | 974 | IL23 |
| XENP53301 | 975 | IL23 | 976 | TL1A | 977 | IL23 |
| XENP53302 | 978 | IL23 | 979 | TL1A | 980 | IL23 |
| XENP53303 | 981 | IL23 | 982 | TL1A | 983 | IL23 |
| XENP53304 | 984 | IL23 | 985 | TL1A | 986 | IL23 |
| XENP53305 | 987 | IL23 | 988 | TL1A | 989 | IL23 |
| XENP53306 | 990 | IL23 | 991 | TL1A | 992 | IL23 |
| XENP53307 | 993 | IL23 | 994 | TL1A | 995 | IL23 |
| XENP53317 | 996 | TL1A | 997 | IL23 | 998 | TL1A |
| XENP53318 | 999 | TL1A | 1000 | IL23 | 1001 | TL1A |
| XENP53319 | 1002 | TL1A | 1003 | IL23 | 1004 | TL1A |
| XENP53320 | 1005 | TL1A | 1006 | IL23 | 1007 | TL1A |
| XENP53321 | 1008 | TL1A | 1009 | IL23 | 1010 | TL1A |
| XENP55885 | 1011 | TL1A | 1012 | IL23 | 1013 | TL1A |
| XENP55886 | 1014 | TL1A | 1015 | IL23 | 1016 | TL1A |
| XENP55887 | 1017 | TL1A | 1018 | IL23 | 1019 | TL1A |

### 3B: OrthoFab

[0559] Production of bispecific antibodies in IgG format is challenging, as antibody heavy chains bind antibody light chains in a relatively promiscuous manner. As a result of this promiscuous pairing, concomitant expression of, e.g., two antibody heavy chains and two antibody light chains naturally leads to heavy chain homodimerization and/or scrambling of heavy chain/light chain pairings. There are numerous approaches to circumvent the problem of heavy chain homodimerization, including those described in U.S. Pat. No. 10,858,417. However, circumventing the scrambling of heavy chain/light chain pairing has been more difficult due to the complex multidomain heterodimeric interactions within antibody Fabs (i.e., assembly driven by both VH/VL and CH1/CL domain interactions).

### 3B(1): Engineering Electrostatic Variants in the CH1:CL Interface:

[0560] A first strategy is based on identification of a salt bridge formed by K213/K218 in the CH1 and D122/E123 in the CL (positions in EU numbering). Without being limited by theory, substitutions are engineered at these residues to skew towards formation of correct heavy chain/light chain pairs by an electrostatic steering mechanism. As depicted in FIG. 4, Panel A, the goal is to engineer substitutions in the CH1 and/or CL so that Heavy Chain A pairs with Light Chain A and Heavy Chain B pairs with Light Chain B by virtue of electrostatic complementarity. Conversely, as depicted in FIG. 4, Panel B, the substitutions disfavor the pairing of Heavy Chain A with Light Chain B and Heavy Chain B with Light Chain A. While FIG. 4 depicts K213E/K218D:D122K/E123K in CH1:CL interface of Fab A and WT in Fab B, additional substitution pairings as depicted in Table 27 are also contemplated. Table 27 depicts electrostatic variants which may be introduced at K213/K218:D122/E123 in the CH1:CL interface.

TABLE 27

| Fab A | | Fab B | |
|---|---|---|---|
| CH1 | CL | CH1 | CL |
| K213E/K218D | D122K/E123K | WT | WT |
| K213E/K218E | D122K/E123K | WT | WT |
| K213D/K218E | D122K/E123K | WT | WT |
| K213D/K218D | D122K/E123K | WT | WT |
| K213E/K218D | D122K/E123R | WT | WT |
| K213E/K218E | D122K/E123R | WT | WT |
| K213D/K218E | D122K/E123R | WT | WT |
| K213D/K218D | D122K/E123R | WT | WT |
| K213E/K218D | D122R/E123K | WT | WT |
| K213E/K218E | D122R/E123K | WT | WT |
| K213D/K218E | D122R/E123K | WT | WT |
| K213D/K218D | D122R/E123K | WI | WT |
| K213E/K218D | D122R/E123R | WT | WT |
| K213E/K218E | D122R/E123R | WT | WT |
| K213D/K218E | D122R/E123R | WT | WT |
| K213D/K218D | D122R/E123R | WT | WT |
| WT | WT | K213E/K218D | D122K/E123K |
| WT | WT | K213E/K218E | D122K/E123K |
| WT | WT | K213D/K218E | D122K/E123K |
| WT | WT | K213D/K218D | D122K/E123K |
| WT | WT | K213E/K218D | D122K/E123R |
| WT | WT | K213E/K218E | D122K/E123R |
| WT | WT | K213D/K218E | D122K/E123R |
| WT | WT | K213D/K218D | D122K/E123R |
| WT | WT | K213E/K218D | D122R/E123K |
| WT | WT | K213E/K218E | D122R/E123K |
| WT | WT | K213D/K218E | D122R/E123K |
| WT | WT | K213D/K218D | D122R/E123K |
| WT | WT | K213E/K218D | D122R/E123R |
| WT | WT | K213E/K218E | D122R/E123R |
| WT | WT | K213D/K218E | D122R/E123R |
| WT | WT | K213D/K218D | D122R/E123R |

### 3B(2). Engineering Steric Variants in the CH1:CL Interface:

[0561] A second strategy for developing variants described herein is based on a “knob-in-hole” pair formed by A141 in the CH1 and F116 in the CL; A141F in the CH1 and F118 in the CL; and K147 in CH1 and S131 in the CL (positions in EU numbering). Without being limited by theory, substitutions are engineered at these residues to skew towards formation of correct heavy chain/light chain pairs by a steric hindrance mechanism. As depicted in FIG. 5, Panel A, the goal is to engineer substitution in the CH1 and/or CL so that Heavy Chain A pairs with Light Chain A and Heavy Chain B pairs with Light Chain B by virtue of steric complementarity. Conversely, as depicted in FIG. 5, Panel B, the substitutions disfavor the pairing of Heavy Chain A with Light Chain B and Heavy Chain B with Light Chain A. While FIG. 5 depicts WT in Fab A and A141F:F118A in CH1:CL interface of Fab B, additional substitution pairings as depicted in Table 28 are also contemplated. Table 28 depicts electrostatic variants which may be introduced at A141:F116, A141:F118, or K147:S131 in the CH1:CL interface.

TABLE 28

| | |
|---|---|
| Fab A | Fab B |

| CH1 | CL | CH1 | CL |
|---|---|---|---|
| WT | WT | A141F | F116A |
| A141F | F116A | WT | WT |
| WT | WT | A141F | F118A |
| A141F | F118A | WT | WT |
| WT | WT | K147S | S131K |
| K147S | S131K | WT | WT |

### 3B(3). Engineering Electrostatic Variants in the VH:VL Interface:

[0562] A third strategy is based on a hydrogen bonded pair formed by Q39 in the VH and Q38 in the VL (positions in Kabat numbering). By electrostatic steering mechanism, substitutions engineered at these residues to skew towards formation of correct heavy chain/light chain pairs. As depicted in FIG. 6, Panel A, the goal is to engineer substitutions in the VH and/or VL so that Heavy Chain A pairs with Light Chain A and Heavy Chain B pairs with Light Chain B by virtue of electrostatic complementarity. Conversely, as depicted in FIG. 6, Panel B, the substitutions disfavor the pairing of Heavy Chain A with Light Chain B and Heavy Chain B with Light Chain A. While FIG. 6 depicts Q39E:Q38K in VH:VL interface of Fab A and Q39K:Q38E in VH:VL interface of Fab B, additional substitution pairings as depicted in Tables 18 and 19 are also contemplated.

### 3B(4). Combining Variants in the VH:VL and CH1:CL Interfaces:

[0563] To fully leverage the multidomain interactions within the Fabs, another strategy is to combine each of the foregoing strategies, or to combine at least two of the foregoing strategies (such as, for example, VH:VL interface electrostatic variants and CH1:CL interface electrostatic variants, or VH:VL interface electrostatic variants and CH1:CL interface steric variants). As depicted in FIG. 7, Panel A, one such combination utilizes Q39E:Q38K in VH:VL interface and K213E/K218D:D122K/E123K in CH1:CL interface of Fab A and Q39K:Q38E in VH:VL interface and A141F:F118A in CH1:CL interface of Fab B; however, additional combinations of any of the substitutions in Tables 27-28 and 18-19 are also contemplated.

[0564] Schematic for OrthoFab is depicted in FIG. 1, Panel P. Sequences of illustrative TL1A×IL23 bsAbs in the OrthoFab 1+1 format including Q39E:Q38K in VH:VL interface and K213E/K218D:D122K/E123K in CH1:CL interface of Fab A and Q39K:Q38E in VH:VL interface and A141F:F118A in the CH1:CL interface is depicted in Tables 29 and 30. CDRs are underlined and slashes indicate the border(s) between the variable regions, linkers, Fc regions, and constant domains. It should be noted that the TL1A×IL23 bsAbs can utilize variable region, Fc region, and constant domain sequences that are 90, 95, 98 and 99% identical (as defined herein), and/or contain from 1, 2, 3, 4, 5, 6, 7, 8, 9 or 10 amino acid substitutions. In addition, each sequence outlined herein can include or exclude the M428L/N434S or any other half-life extension variants and/or any other ablation variant (as depicted in Table 1) in one or preferably both Fc domains Additionally, each sequence can utilize any other heterodimeric Fc variant as depicted in Table 12-17.

TABLE 29
XENP49686 - IL23-A[IL23]_H1_Q39E/K213E/K218D_L1_Q38K/D122K/E123K Fab-
041[TL1a]_H1_Q39K/A141F_L1_Q38E/F118AFab-IgG1_pI(-)_Isosteric_A_PVA_/S267K/L368D/K370S-
IgG1_PVA_/S267K/S364K/E357Q
Chain 1 - IL23-A[IL23]_H1_Q39E/K213E/K218D_IgG1_pI(-)_Isosteric_A_PVA_/S267K/L368D/K370S
SEQ ID NO: 1020
QVQLVQSGAEVKKPGSSVKVSCKASGYTFTDQTIHWMREAPGQGLEWIGYIYPRDDSPKYNENFKGKVTITADKSTSTAYMELSS
LRSEDTAVYYCAIPDRSGYAWFIYWGQGTLVTVSS/ASTKGPSVFPLAPSSKSTSGGTAALGCLVKDYFPEPVTVSWNSGALTSGV
HTFPAVLQSSGLYSLSSVVTVPSSSLGTQTYICNVNHKPSDTKVDEKVEPDSCDKTHTCPPCPAPPVAGPSVFLFPPKPKDTLMISRT
PEVTCVVVDVKHEDPEVKFNWYVDGVEVHNAKTKPREEEYNSTYRVVSVLTVLHQDWLNGKEYKCKVSNKALPAPIEKTISKA
KGQPREPQVYTLPPSREEMTKNQVSLTCDVSGFYPSDIAVEWESDGQPENNYKTTPPVLDSDGSFFLYSKLTVDKSRWEQGDVFSC
SVMHEALHNHYTQKSLSLSPGK
Chain 2 - 041[TL1a]_H1_Q39K/A141F_IgG1_PVA_/S267K/S364K/E357Q
SEQ ID NO: 1021
QVQLVQSGAEVKKPGASVKVSCKVSGFSVTSYNVHWVRKAPGQGLEWMGVMWSGGNTDYNSKFQGRVTMTRDTSTNTVYME
LSSLRSEDTAVYYCARAGRYYHDSNYYWDFPYWGQGTLVTVSS/ASTKGPSVFPLAPSSKSTSGGTAFLGCLVKDYFPEPVTVSW
NSGALTSGVHTFPAVLQSSGLYSLSSVVTVPSSSLGTQTYICNVNHKPSNTKVDKKVEPKSCDKTHTCPPCPAPPVAGPSVFLFPPK
PKDTLMISRTPEVTCVVVDVKHEDPEVKFNWYVDGVEVHNAKTKPREEQYNSTYRVVSVLTVLHQDWLNGKEYKCKVSNKALP
APIEKTISKAKGQPREPQVYTLPPSREQMTKNQVKLTCLVKGFYPSDIAVEWESNGQPENNYKTTPPVLDSDGSFFLYSKLTVDKSR
WQQGNVFSCSVMHEALHNHYTQKSLSLSPGK
Chain 3 - IL23-A[IL23]_L1_Q38K/D122K/E123K Light Chain
SEQ ID NO: 1022
DIQMTQSPSSLSASVGDRVTITCKASRDVAIAVAWYQKKPGKVPKLLIYWASTRHTGVPSRFSGSGSRTDFTLTISSLQPEDVADYF
CHQYSSYPFTFGSGTKLEIK/RTVAAPSVFIFPPSKKQLKSGTASVVCLLNNFYPREAKVQWKVDNALQSGNSQESVTEQDSKDSTY
SLSSTLTLSKADYEKHKVYACEVTHQGLSSPVTKSFNRGEC
Chain 4 - 041[TL1a]_L1_Q38E/F118A Light Chain
SEQ ID NO: 1023
DIQMTQSPSSVSASVGDRVTITCRASEDIYSGLAWYQEKPGKSPKLLIYGASSLQDGVPSRFSGSGSGTDYTLTISSLQPEDFATYFC
QEGLKSPYTFGAGTKLEIK/RTVAAPSVFIAPPSDEQLKSGTASVVCLLNNFYPREAKVQWKVDNALQSGNSQESVTEQDSKDSTY
SLSSTLTLSKADYEKHKVYACEVTHQGLSSPVTKSFNRGEC
XENP49687 - IL23-A[IL23]_H1_Q39E/K213E/K218D_L1_Q38K/D122K/E123K Fab-
069[TL1a]_H1_Q39K/A141F_L1_Q38E/F118A Fab-IgG1_pI(-)_Isosteric_A_PVA_/S267K/L368D/K370S-
IgG1_PVA_/S267K/S364K/E357Q
Chain 1 - IL23-A[IL23]_H1_Q39E/K213E/K218D_IgG1_pI(-)_Isosteric_A_PVA_/S267K/L368D/K370S
SEQ ID NO: 1024
QVQLVQSGAEVKKPGSSVKVSCKASGYTFTDQTIHWMREAPGQGLEWIGYIYPRDDSPKYNENFKGKVTITADKSTSTAYMELSS
LRSEDTAVYYCAIPDRSGYAWFIYWGQGTLVTVSS/ASTKGPSVFPLAPSSKSTSGGTAALGCLVKDYFPEPVTVSWNSGALTSGV
HTFPAVLQSSGLYSLSSVVTVPSSSLGTQTYICNVNHKPSDTKVDEKVEPDSCDKTHTCPPCPAPPVAGPSVFLFPPKPKDTLMISRT
PEVTCVVVDVKHEDPEVKFNWYVDGVEVHNAKTKPREEEYNSTYRVVSVLTVLHQDWLNGKEYKCKVSNKALPAPIEKTISKA
KGQPREPQVYTLPPSREEMTKNQVSLTCDVSGFYPSDIAVEWESDGQPENNYKTTPPVLDSDGSFFLYSKLTVDKSRWEQGDVFSC
SVMHEALHNHYTQKSLSLSPGK
Chain 2 - 069[TL1a]_H1_Q39K/A141F_IgG1_PVA_/S267K/S364K/E357Q
SEQ ID NO: 1025
DIQMTQSPSSLSASVGDRVTITCKASRDVAIAVAWYQKKPGKVPKLLIYWASTRHTGVPSRFSGSGSRTDFTLTISSLQPEDVADYF
CHQYSSYPFTFGSGTKLEIK/RTVAAPSVFIFPPSKKQLKSGTASVVCLLNNFYPREAKVQWKVDNALQSGNSQESVTEQDSKDSTY
SLSSTLTLSKADYEKHKVYACEVTHQGLSSPVTKSFNRGEC
Chain 3 - IL23-A[IL23]_L1_Q38K/D122K/E123K Light Chain
SEQ ID NO: 1026
EVQLVESGGGLVQPGGSLKLSCAASGFDIIDDYIHWVRKASGKGLEWVGRIDPASANTKYVPSVKGRFTISADTSKNTAYLQMNS
LKTEDTAVYYCTRKGFAYWGQGTLVTVSS/ASTKGPSVFPLAPSSKSTSGGTAFLGCLVKDYFPEPVTVSWNSGALTSGVHTFPAV
LQSSGLYSLSSVVTVPSSSLGTQTYICNVNHKPSNTKVDKKVEPKSCDKTHTCPPCPAPPVAGPSVFLFPPKPKDTLMISRTPEVT
CVVVDVKHEDPEVKFNWYVDGVEVHNAKTKPREEQYNSTYRVVSVLTVLHQDWLNGKEYKCKVSNKALPAPIEKTISKAKGQPRE
PQVYTLPPSREQMTKNQVKLTCLVKGFYPSDIAVEWESNGQPENNYKTTPPVLDSDGSFFLYSKLTVDKSRWQQGNVFSCSVMHE
ALHNHYTQKSLSLSPGK
Chain 4 - 069[TL1a]_L1_Q38E/F118A Light Chain
SEQ ID NO: 1027
NIVMTQTPLSLSVTPGQPASISCKASENVGTYVSWYLEKPGQSPQLLIYGTSNRYTGVPDRFTGSGSATDFTLKISRVEAEDVGVYH
CGQSYRYPYTFGGGTKLEIK/RTVAAPSVFIAPPSDEQLKSGTASVVCLLNNFYPREAKVQWKVDNALQSGNSQESVTEQDSKDST
YSLSSTLTLSKADYEKHKVYACEVTHQGLSSPVTKSFNRGEC
XENP49688 - IL23-A[IL23]_H1_Q39E/K213E/K218D_L1_Q38K/D122K/E123K Fab-
111[TL1a]_H1_Q39K/A141F_L1_Q38E/F118A Fab-IgG1_pI(-)_Isosteric_A_PVA_/S267K/L368D/K370S-
IgG1_PVA_/S267K/S364K/E357Q
Chain 1 - IL23-A[IL23]_H1_Q39E/K213E/K218D_IgG1_pI(-)_Isosteric_A_PVA_/S267K/L368D/K370S
SEQ ID NO: 1028
QVQLVQSGAEVKKPGSSVKVSCKASGYTFTDQTIHWMREAPGQGLEWIGYIYPRDDSPKYNENFKGKVTITADKSTSTAYMELSS
LRSEDTAVYYCAIPDRSGYAWFIYWGQGTLVTVSS/ASTKGPSVFPLAPSSKSTSGGTAALGCLVKDYFPEPVTVSWNSGALTSGV
HTFPAVLQSSGLYSLSSVVTVPSSSLGTQTYICNVNHKPSDTKVDEKVEPDSCDKTHTCPPCPAPPVAGPSVFLFPPKPKDTLMISRT
PEVTCVVVDVKHEDPEVKFNWYVDGVEVHNAKTKPREEEYNSTYRVVSVLTVLHQDWLNGKEYKCKVSNKALPAPIEKTISKA
KGQPREPQVYTLPPSREEMTKNQVSLTCDVSGFYPSDIAVEWESDGQPENNYKTTPPVLDSDGSFFLYSKLTVDKSRWEQGDVFSC
SVMHEALHNHYTQKSLSLSPGK
Chain 2 - 111[TL1a]_H1_Q39K/A141F_IgG1_PVA_/S267K/S364K/E357Q
SEQ ID NO: 1029
EVQLVESGGGLVQPGGSLRLSCAASGFTFSSFGMHWVRKAPGKGLEWVSYISSGSTTIYYADSVKGRFTISRDNAKNSLYLQMNS
LRAEDTAVYYCARAPLLRGAMDYWGQGTLVTVSS/ASTKGPSVFPLAPSSKSTSGGTAFLGCLVKDYFPEPVTVSWNSGALTSGV
HTFPAVLQSSGLYSLSSVVTVPSSSLGTQTYICNVNHKPSNTKVDKKVEPKSCDKTHTCPPCPAPPVAGPSVFLFPPKPKDTLMISRT
PEVTCVVVDVKHEDPEVKFNWYVDGVEVHNAKTKPREEQYNSTYRVVSVLTVLHQDWLNGKEYKCKVSNKALPAPIEKTISKA
KGQPREPQVYTLPPSREQMTKNQVKLTCLVKGFYPSDIAVEWESNGQPENNYKTTPPVLDSDGSFFLYSKLTVDKSRWQQGNVFS
CSVMHEALHNHYTQKSLSLSPGK
Chain 3 - IL23-A[IL23]_L1_Q38K/D122K/E123K Light Chain
SEQ ID NO: 1030
DIQMTQSPSSLSASVGDRVTITCKASRDVAIAVAWYQKKPGKVPKLLIYWASTRHTGVPSRFSGSGSRTDFTLTISSLQPEDVADYF
CHQYSSYPFTFGSGTKLEIK/RTVAAPSVFIFPPSKKQLKSGTASVVCLLNNFYPREAKVQWKVDNALQSGNSQESVTEQDSKDSTY
SLSSTLTLSKADYEKHKVYACEVTHQGLSSPVTKSFNRGEC
Chain 4 - 111[TL1a]_L1_Q38E/F118A Light Chain
SEQ ID NO: 1031
DIVMTQSPDSLAVSLGERATINCKASQDVSTAVVWYQEKPGQSPKLLIYWASTRHTGVPDRFTGSGSGTDYTLTISSLQAEDVAVY
HCQQHYSTPYTFGGGTKLEIK/RTVAAPSVFIAPPSDEQLKSGTASVVCLLNNFYPREAKVQWKVDNALQSGNSQESVTEQDSKDS
TYSLSSTLTLSKADYEKHKVYACEVTHQGLSSPVTKSFNRGEC
XENP49689 - IL23-A[IL23]_H1_Q39E/K213E/K218D_L1_Q38K/D122K/E123K_Fab-
041[TL1a]_H1_Q39K/A141F_L1_Q38E/F118A Fab-IgG1_pI(-)_Isosteric_A_PVA_/
S267K/L368D/K370S/M428L/N434S-IgG1_PVA_/S267K/S364K/E357Q/M428L/N434S
Chain 1 - IL23-A[IL23]_H1_Q39E/K213E/K218D_IgG1_pI(-)_Isosteric_A_PVA_/
S267K/L368D/K370S/M428L/N434S SEQ ID NO: 1032
QVQLVQSGAEVKKPGSSVKVSCKASGYTFTDQTIHWMREAPGQGLEWIGYIYPRDDSPKYNENFKGKVTITADKSTSTAYMELSS
LRSEDTAVYYCAIPDRSGYAWFIYWGQGTLVTVSS/ASTKGPSVFPLAPSSKSTSGGTAALGCLVKDYFPEPVTVSWNSGALTSGV
HTFPAVLQSSGLYSLSSVVTVPSSSLGTQTYICNVNHKPSDTKVDEKVEPDSCDKTHTCPPCPAPPVAGPSVFLFPPKPKDTLMISRT
PEVTCVVVDVKHEDPEVKFNWYVDGVEVHNAKTKPREEEYNSTYRVVSVLTVLHQDWLNGKEYKCKVSNKALPAPIEKTISKA
KGQPREPQVYTLPPSREEMTKNQVSLTCDVSGFYPSDIAVEWESDGQPENNYKTTPPVLDSDGSFFLYSKLTVDKSRWEQGDVFSC
SVLHEALHSHYTQKSLSLSPGK
Chain 2 - 041[TL1a]_H1_Q39K/A141F_IgG1_PVA_/S267K/S364K/E357Q/M428L/N434S
SEQ ID NO: 1033
QVQLVQSGAEVKKPGASVKVSCKVSGFSVTSYNVHWVRKAPGQGLEWMGVMWSGGNTDYNSKFQGRVTMTRDTSTNTVYME
LSSLRSEDTAVYYCARAGRYYHDSNYYWDFPYWGQGTLVTVSS/ASTKGPSVFPLAPSSKSTSGGTAFLGCLVKDYFPEPVTVSW
NSGALTSGVHTFPAVLQSSGLYSLSSVVTVPSSSLGTQTYICNVNHKPSNTKVDKKVEPKSCDKTHTCPPCPAPPVAGPSVFLFPPK
PKDTLMISRTPEVTCVVVDVKHEDPEVKFNWYVDGVEVHNAKTKPREEQYNSTYRVVSVLTVLHQDWLNGKEYKCKVSNKALP
APIEKTISKAKGQPREPQVYTLPPSREQMTKNQVKLTCLVKGFYPSDIAVEWESNGQPENNYKTTPPVLDSDGSFFLYSKLTVDKSR
WQQGNVFSCSVLHEALHSHYTQKSLSLSPGK
Chain 3 - IL23-A[IL23]_L1_Q38K/D122K/E123K Light Chain
SEQ ID NO: 1034
DIQMTQSPSSLSASVGDRVTITCKASRDVAIAVAWYQKKPGKVPKLLIYWASTRHTGVPSRFSGSGSRTDFTLTISSLQPEDVADYF
CHQYSSYPFTFGSGTKLEIK/RTVAAPSVFIFPPSKKQLKSGTASVVCLLNNFYPREAKVQWKVDNALQSGNSQESVTEQDSKDSTY
SLSSTLTLSKADYEKHKVYACEVTHQGLSSPVTKSFNRGEC
Chain 4 - 041[TL1a]_L1_Q38E/F118A Light Chain
SEQ ID NO: 1035
DIQMTQSPSSVSASVGDRVTITCRASEDIYSGLAWYQEKPGKSPKLLIYGASSLQDGVPSRFSGSGSGTDYTLTISSLQPEDFATYFC
QEGLKSPYTFGAGTKLEIK/RTVAAPSVFIAPPSDEQLKSGTASVVCLLNNFYPREAKVQWKVDNALQSGNSQESVTEQDSKDSTY
SLSSTLTLSKADYEKHKVYACEVTHQGLSSPVTKSFNRGEC
XENP49690 - IL23-A[IL23]_H1_Q39E/K213E/K218D_L1_Q38K/D122K/E123K Fab-
069[TL1a]_H1_Q39K/A141F_L1_Q38E/F118A Fab-IgG1_pI(-)_Isosteric_A_PVA_/
S267K/L368D/K370S/M428L/N434S-
IgG1_PVA_/S267K/S364K/E357Q/M428L/N434S
Chain - IL23-A[IL23]_H1_Q39E/K213E/K218D_IgG1_pI(-)_Isosteric_A_PVA_/
S267K/L368D/K370S/M428L/N434S SEQ ID NO: 1036
QVQLVQSGAEVKKPGSSVKVSCKASGYTFTDQTIHWMREAPGQGLEWIGYIYPRDDSPKYNENFKGKVTITADKSTSTAYMELSS
LRSEDTAVYYCAIPDRSGYAWFIYWGQGTLVTVSS/ASTKGPSVFPLAPSSKSTSGGTAALGCLVKDYFPEPVTVSWNSGALTSGV
HTFPAVLQSSGLYSLSSVVTVPSSSLGTQTYICNVNHKPSDTKVDEKVEPDSCDKTHTCPPCPAPPVAGPSVFLFPPKPKDTLMISRT
PEVTCVVVDVKHEDPEVKFNWYVDGVEVHNAKTKPREEEYNSTYRVVSVLTVLHQDWLNGKEYKCKVSNKALPAPIEKTISKA
KGQPREPQVYTLPPSREEMTKNQVSLTCDVSGFYPSDIAVEWESDGQPENNYKTTPPVLDSDGSFFLYSKLTVDKSRWEQGDVFSC
SVLHEALHSHYTQKSLSLSPGK
Chain 2 - 069[TL1a]_H1_Q39K/A141F_IgG1_PVA_/S267K/S364K/E357Q/M428L/N434S
SEQ ID NO: 1037
EVQLVESGGGLVQPGGSLKLSCAASGFDIIDDYIHWVRKASGKGLEWVGRIDPASANTKYVPSVKGRFTISADTSKNTAYLQMNS
LKTEDTAVYYCTRKGFAYWGQGTLVTVSS/ASTKGPSVFPLAPSSKSTSGGTAFLGCLVKDYFPEPVTVSWNSGALTSGVHTFPAV
LQSSGLYSLSSVVTVPSSSLGTQTYICNVNHKPSNTKVDKKVEPKSCDKTHTCPPCPAPPVAGPSVFLFPPKPKDTLMISRTPEVTCV
VVDVKHEDPEVKFNWYVDGVEVHNAKTKPREEQYNSTYRVVSVLTVLHQDWLNGKEYKCKVSNKALPAPIEKTISKAKGQPRE
PQVYTLPPSREQMTKNQVKLTCLVKGFYPSDIAVEWESNGQPENNYKTTPPVLDSDGSFFLYSKLTVDKSRWQQGNVFSCSVLHE
ALHSHYTQKSLSLSPGK
Chain 3 - IL23-A[IL23]_L1_Q38K/D122K/E123K Light Chain
SEQ ID NO: 1038
DIQMTQSPSSLSASVGDRVTITCKASRDVAIAVAWYQKKPGKVPKLLIYWASTRHTGVPSRFSGSGSRTDFTLTISSLQPEDVADYF
CHQYSSYPFTFGSGTKLEIK/RTVAAPSVFIFPPSKKQLKSGTASVVCLLNNFYPREAKVQWKVDNALQSGNSQESVTEQDSKDSTY
SLSSTLTLSKADYEKHKVYACEVTHQGLSSPVTKSFNRGEC
Chain 4 - 069[TL1a]_L1_Q38E/F118A Light Chain
SEQ ID NO: 1039
NIVMTQTPLSLSVTPGQPASISCKASENVGTYVSWYLEKPGQSPQLLIYGTSNRYTGVPDRFTGSGSATDFTLKISRVEAEDVGVYH
CGQSYRYPYTFGGGTKLEIK/RTVAAPSVFIAPPSDEQLKSGTASVVCLLNNFYPREAKVQWKVDNALQSGNSQESVTEQDSKDST
YSLSSTLTLSKADYEKHKVYACEVTHQGLSSPVTKSFNRGEC
XENP49691 - IL23-A[IL23]_H1_Q39E/K213E/K218D_L1_Q38K/D122K/E123K Fab-
111[TL1a]_H1_Q39K/A141F_L1_Q38E/F118AFab-IgG1_pI(-)IsostericA PVA /S267K/
L368D/K370S/M428L/N434S-
IgG1_PVA_/S267K/S364K/E357Q/M428L/N434S
Chain - IL23-A[IL23]_H1_Q39E/K213E/K218D_IgG1_pI(-)_Isosteric_A_PVA_/
S267K/L368D/K370S/M428L/N434S SEQ ID NO: 1040
QVQLVQSGAEVKKPGSSVKVSCKASGYTFTDQTIHWMREAPGQGLEWIGYIYPRDDSPKYNENFKGKVTITADKSTSTAYMELSS
LRSEDTAVYYCAIPDRSGYAWFIYWGQGTLVTVSS/ASTKGPSVFPLAPSSKSTSGGTAALGCLVKDYFPEPVTVSWNSGALTSGV
HTFPAVLQSSGLYSLSSVVTVPSSSLGTQTYICNVNHKPSDTKVDEKVEPDSCDKTHTCPPCPAPPVAGPSVFLFPPKPKDTLMISRT
PEVTCVVVDVKHEDPEVKFNWYVDGVEVHNAKTKPREEEYNSTYRVVSVLTVLHQDWLNGKEYKCKVSNKALPAPIEKTISKA
KGQPREPQVYTLPPSREEMTKNQVSLTCDVSGFYPSDIAVEWESDGQPENNYKTTPPVLDSDGSFFLYSKLTVDKSRWEQGDVFSC
SVLHEALHSHYTQKSLSLSPGK
Chain 2 - 111[TL1a]_H1_Q39K/A141F_IgG1_PVA_/S267K/S364K/E357Q/M428L/N434S
SEQ ID NO: 1041
EVQLVESGGGLVQPGGSLRLSCAASGFTFSSFGMHWVRKAPGKGLEWVSYISSGSTTIYYADSVKGRFTISRDNAKNSLYLQMNS
LRAEDTAVYYCARAPLLRGAMDYWGQGTLVTVSS/ASTKGPSVFPLAPSSKSTSGGTAFLGCLVKDYFPEPVTVSWNSGALTSGV
HTFPAVLQSSGLYSLSSVVTVPSSSLGTQTYICNVNHKPSNTKVDKKVEPKSCDKTHTCPPCPAPPVAGPSVFLFPPKPKDTLMIS
RTPEVTCVVVDVKHEDPEVKFNWYVDGVEVHNAKTKPREEQYNSTYRVVSVLTVLHQDWLNGKEYKCKVSNKALPAPIEKTISKA
KGQPREPQVYTLPPSREQMTKNQVKLTCLVKGFYPSDIAVEWESNGQPENNYKTTPPVLDSDGSFFLYSKLTVDKSRWQQGNVFS
CSVLHEALHSHYTQKSLSLSPGK
Chain 3 - IL23-A[IL23]_L1_Q38K/D122K/E123K Light Chain
SEQ ID NO: 1042
DIQMTQSPSSLSASVGDRVTITCKASRDVAIAVAWYQKKPGKVPKLLIYWASTRHTGVPSRFSGSGSRTDFTLTISSLQPEDVADYF
CHQYSSYPFTFGSGTKLEIK/RTVAAPSVFIFPPSKKQLKSGTASVVCLLNNFYPREAKVQWKVDNALQSGNSQESVTEQDSKDSTY
SLSSTLTLSKADYEKHKVYACEVTHQGLSSPVTKSFNRGEC
Chain 4 - 111[TL1a]_L1_Q38E/F118A Light Chain
SEQ ID NO: 1043
DIVMTQSPDSLAVSLGERATINCKASQDVSTAVVWYQEKPGQSPKLLIYWASTRHTGVPDRFTGSGSGTDYTLTISSLQAEDVAVY
HCQQHYSTPYTFGGGTKLEIK/RTVAAPSVFIAPPSDEQLKSGTASVVCLLNNFYPREAKVQWKVDNALQSGNSQESVTEQDSKDS
TYSLSSTLTLSKADYEKHKVYACEVTHQGLSSPVTKSFNRGEC
XENP49746 - 041[TL1a]_H1_Q39E/K213E/K218D_L1_Q38K/D122K/E123K_Fab-IL23-
A[IL23]_H1_Q39K/A141F_L1_Q38E/F118A Fab-IgG1_pI(-)_Isosteric_A_PVA_/S267K/L368D/K370S-
IgG1_PVA_/S267K/S364K/E357Q
Chain - 041[TL1a]_H1_Q39E/K213E/K218D_IgG1_pI(-)_Isosteric_A_PVA_/S267K/L368D/K370S
SEQ ID NO: 1044
QVQLVQSGAEVKKPGASVKVSCKVSGFSVTSYNVHWVREAPGQGLEWMGVMWSGGNTDYNSKFQGRVTMTRDTSTNTVYME
LSSLRSEDTAVYYCARAGRYYHDSNYYWDFPYWGQGTLVTVSS/ASTKGPSVFPLAPSSKSTSGGTAALGCLVKDYFPEPVTVSW
NSGALTSGVHTFPAVLQSSGLYSLSSVVTVPSSSLGTQTYICNVNHKPSDTKVDEKVEPDSCDKTHTCPPCPAPPVAGPSVFLFPP
KPKDTLMISRTPEVTCVVVDVKHEDPEVKFNWYVDGVEVHNAKTKPREEEYNSTYRVVSVLTVLHQDWLNGKEYKCKVSNKALPA
PIEKTISKAKGQPREPQVYTLPPSREEMTKNQVSLTCDVSGFYPSDIAVEWESDGQPENNYKTTPPVLDSDGSFFLYSKLTVDKSRW
EQGDVFSCSVMHEALHNHYTQKSLSLSPGK
Chain 2 - IL23-A[IL23]_H1_Q39K/A141F_IgG1_PVA_/S267K/S364K/E357Q
SEQ ID NO: 1045
QVQLVQSGAEVKKPGSSVKVSCKASGYTFTDQTIHWMRKAPGQGLEWIGYIYPRDDSPKYNENFKGKVTITADKSTSTAYMELSS
LRSEDTAVYYCAIPDRSGYAWFIYWGQGTLVTVSS/ASTKGPSVFPLAPSSKSTSGGTAFLGCLVKDYFPEPVTVSWNSGALTSGV
HTFPAVLQSSGLYSLSSVVTVPSSSLGTQTYICNVNHKPSNTKVDKKVEPKSCDKTHTCPPCPAPPVAGPSVFLFPPKPKDTLMIS
RTPEVTCVVVDVKHEDPEVKFNWYVDGVEVHNAKTKPREEQYNSTYRVVSVLTVLHQDWLNGKEYKCKVSNKALPAPIEKTISKA
KGQPREPQVYTLPPSREQMTKNQVKLTCLVKGFYPSDIAVEWESNGQPENNYKTTPPVLDSDGSFFLYSKLTVDKSRWQQGNVFS
CSVMHEALHNHYTQKSLSLSPGK
Chain 3 - 041[TL1a]_L1_Q38K/D122K/E123K Light Chain
SEQ ID NO: 1046
DIQMTQSPSSVSASVGDRVTITCRASEDIYSGLAWYQKKPGKSPKLLIYGASSLQDGVPSRFSGSGSGTDYTLTISSLQPEDFATYFC
QEGLKSPYTFGAGTKLEIK/RTVAAPSVFIFPPSKKQLKSGTASVVCLLNNFYPREAKVQWKVDNALQSGNSQESVTEQDSKDSTY
SLSSTLTLSKADYEKHKVYACEVTHQGLSSPVTKSFNRGEC
Chain 4 - IL23-A[IL23]_L1_Q38E/F118A Light Chain
SEQ ID NO: 1047
DIQMTQSPSSLSASVGDRVTITCKASRDVAIAVAWYQEKPGKVPKLLIYWASTRHTGVPSRFSGSGSRTDFTLTISSLQPEDVADYF
CHQYSSYPFTFGSGTKLEIK/RTVAAPSVFIAPPSDEQLKSGTASVVCLLNNFYPREAKVQWKVDNALQSGNSQESVTEQDSKDSTY
SLSSTLTLSKADYEKHKVYACEVTHQGLSSPVTKSFNRGEC
XENP49747 - 069[TL1a]_H1_Q39E/K213E/K218D_L1_Q38K/D122K/E123K_Fab-IL23-
A[IL23]_H1_Q39K/A141F_L1_Q38E/F118A_Fab-IgG1_pI(-)_Isosteric_A_PVA_/S267K/L368D/K370S-
IgG1_PVA_/S267K/S364K/E357Q
Chain - 069[TL1a]_H1_Q39E/K213E/K218D_IgG1_pI(-)_Isosteric_A_PVA_/S267K/L368D/K370S
SEQ ID NO: 1048
EVQLVESGGGLVQPGGSLKLSCAASGFDIIDDYIHWVREASGKGLEWVGRIDPASANTKYVPSVKGRFTISADTSKNTAYLQMNSL
KTEDTAVYYCTRKGFAYWGQGTLVTVSS/ASTKGPSVFPLAPSSKSTSGGTAALGCLVKDYFPEPVTVSWNSGALTSGVHTFPAVL
QSSGLYSLSSVVTVPSSSLGTQTYICNVNHKPSDTKVDEKVEPDSCDKTHTCPPCPAPPVAGPSVFLFPPKPKDTLMISRTPEVTC
VVVDVKHEDPEVKFNWYVDGVEVHNAKTKPREEEYNSTYRVVSVLTVLHQDWLNGKEYKCKVSNKALPAPIEKTISKAKGQPREPQ
VYTLPPSREEMTKNQVSLTCDVSGFYPSDIAVEWESDGQPENNYKTTPPVLDSDGSFFLYSKLTVDKSRWEQGDVFSCSVMHEAL
HNHYTQKSLSLSPGK
Chain 2 - IL23-A[IL23]_H1_Q39K/A141F_IgG1_PVA_/S267K/S364K/E357Q
SEQ ID NO: 1049
NIVMTQTPLSLSVTPGQPASISCKASENVGTYVSWYLKKPGQSPQLLIYGTSNRYTGVPDRFTGSGSATDFTLKISRVEAEDVGVYH
CGOSYRYPYTFGGGTKLEIK/RTVAAPSVFIFPPSKKQLKSGTASVVCLLNNFYPREAKVQWKVDNALQSGNSQESVTEQDSKDST
YSLSSTLTLSKADYEKHKVYACEVTHQGLSSPVTKSFNRGEC
Chain 3 - 069[TL1a]_L1_Q38K/D122K/E123K Light Chain
SEQ ID NO: 1050
QVQLVQSGAEVKKPGSSVKVSCKASGYTFTDQTIHWMRKAPGQGLEWIGYIYPRDDSPKYNENFKGKVTITADKSTSTAYMELSS
LRSEDTAVYYCAIPDRSGYAWFIYWGQGTLVTVSS/ASTKGPSVFPLAPSSKSTSGGTAFLGCLVKDYFPEPVTVSWNSGALTSGV
HTFPAVLQSSGLYSLSSVVTVPSSSLGTQTYICNVNHKPSNTKVDKKVEPKSCDKTHTCPPCPAPPVAGPSVFLFPPKPKDTLMIS
RTPEVTCVVVDVKHEDPEVKFNWYVDGVEVHNAKTKPREEQYNSTYRVVSVLTVLHQDWLNGKEYKCKVSNKALPAPIEKTISKA
KGQPREPQVYTLPPSREQMTKNQVKLTCLVKGFYPSDIAVEWESNGQPENNYKTTPPVLDSDGSFFLYSKLTVDKSRWQQGNVFS
CSVMHEALHNHYTQKSLSLSPGK
Chain 4 - IL23-A[IL23]_L1_Q38E/F118A Light Chain
SEQ ID NO: 1051
DIQMTQSPSSLSASVGDRVTITCKASRDVAIAVAWYQEKPGKVPKLLIYWASTRHTGVPSRFSGSGSRTDFTLTISSLQPEDVADYF
CHQYSSYPFTFGSGTKLEIK/RTVAAPSVFIAPPSDEQLKSGTASVVCLLNNFYPREAKVQWKVDNALQSGNSQESVTEQDSKDSTY
SLSSTLTLSKADYEKHKVYACEVTHQGLSSPVTKSFNRGEC
XENP49748 - 111[TL1a]_H1_Q39E/K213E/K218D_L1_Q38K/D122K/E123K_Fab-IL23-
A[IL23]_H1_Q39K/A141F_L1_Q38E/F118A Fab-IgG1 pI(-)_Isosteric_A_PVA_/S267K/L368D/K370S-
IgG1_PVA_/S267K/S364K/E357Q
Chain - 111[TL1a]_H1_Q39E/K213E/K218D_IgG1_pI(-)_Isosteric_A_PVA_/S267K/L368D/K370S
SEQ ID NO: 1052
EVQLVESGGGLVQPGGSLRLSCAASGFTFSSFGMHWVREAPGKGLEWVSYISSGSTTIYYADSVKGRFTISRDNAKNSLYLQMNSL
RAEDTAVYYCARAPLLRGAMDYWGQGTLVTVSS/ASTKGPSVFPLAPSSKSTSGGTAALGCLVKDYFPEPVTVSWNSGALTSGVHT
FPAVLQSSGLYSLSSVVTVPSSSLGTQTYICNVNHKPSDTKVDEKVEPDSCDKTHTCPPCPAPPVAGPSVFLFPPKPKDTLMISRT
PEVTCVVVDVKHEDPEVKFNWYVDGVEVHNAKTKPREEEYNSTYRVVSVLTVLHQDWLNGKEYKCKVSNKALPAPIEKTISKAK
GQPREPQVYTLPPSREEMTKNQVSLTCDVSGFYPSDIAVEWESDGQPENNYKTTPPVLDSDGSFFLYSKLTVDKSRWEQGDVFSCS
VMHEALHNHYTQKSLSLSPGK
Chain 2 - IL23-A[IL23]_H1_Q39K/A141F_IgG1_PVA_/S267K/S364K/E357Q
SEQ ID NO: 1053
QVQLVQSGAEVKKPGSSVKVSCKASGYTFTDQTIHWMRKAPGQGLEWIGYIYPRDDSPKYNENFKGKVTITADKSTSTAYMELSS
LRSEDTAVYYCAIPDRSGYAWFIYWGQGTLVTVSS/ASTKGPSVFPLAPSSKSTSGGTAFLGCLVKDYFPEPVTVSWNSGALTSGV
HTFPAVLQSSGLYSLSSVVTVPSSSLGTQTYICNVNHKPSNTKVDKKVEPKSCDKTHTCPPCPAPPVAGPSVFLFPPKPKDTLMIS
RTPEVTCVVVDVKHEDPEVKFNWYVDGVEVHNAKTKPREEQYNSTYRVVSVLTVLHQDWLNGKEYKCKVSNKALPAPIEKTISKA
KGQPREPQVYTLPPSREQMTKNQVKLTCLVKGFYPSDIAVEWESNGQPENNYKTTPPVLDSDGSFFLYSKLTVDKSRWQQGNVFS
CSVMHEALHNHYTQKSLSLSPGK
Chain 3 - 111[TL1a]_L1_Q38K/D122K/E123K Light Chain
SEQ ID NO: 1054
DIVMTQSPDSLAVSLGERATINCKASQDVSTAVVWYQKKPGQSPKLLIYWASTRHTGVPDRFTGSGSGTDYTLTISSLQAEDVAVY
HCQQHYSTPYTFGGGTKLEIK/RTVAAPSVFIFPPSKKQLKSGTASVVCLLNNFYPREAKVQWKVDNALQSGNSQESVTEQDSKDS
TYSLSSTLTLSKADYEKHKVYACEVTHQGLSSPVTKSFNRGEC
Chain 4 - IL23-A[IL23]_L1_Q38E/F118A Light Chain
SEQ ID NO: 1055
DIQMTQSPSSLSASVGDRVTITCKASRDVAIAVAWYQEKPGKVPKLLIYWASTRHTGVPSRFSGSGSRTDFTLTISSLQPEDVADYF
CHQYSSYPFTFGSGTKLEIK/RTVAAPSVFIAPPSDEQLKSGTASVVCLLNNFYPREAKVQWKVDNALQSGNSQESVTEQDSKDSTY
SLSSTLTLSKADYEKHKVYACEVTHQGLSSPVTKSFNRGEC
XENP49749 - 041[TL1a]_H1_Q39E/K213E/K218D_L1_Q38K/D122K/E123K_Fab-IL23-
A[IL23]_H1_Q39K/A141F_L1_Q38E/F118A Fab-IgG1_pI(-)_Isosteric_A_PVA_/
S267K/L368D/K370S/M428L/N434S-
IgG1_PVA_/S267K/S364K/E357Q/M428L/N434S
Chain - 041[TL1a]_H1_Q39E/K213E/K218D_IgG1_pI(-)_Isosteric_A_PVA_/
S267K/L368D/K370S/M428L/N434S
SEQ ID NO: 1056
QVQLVQSGAEVKKPGASVKVSCKVSGFSVTSYNVHWVREAPGQGLEWMGVMWSGGNTDYNSKFQGRVTMTRDTSTNTVYME
LSSLRSEDTAVYYCARAGRYYHDSNYYWDFPYWGQGTLVTVSS/ASTKGPSVFPLAPSSKSTSGGTAALGCLVKDYFPEPVTVSW
NSGALTSGVHTFPAVLQSSGLYSLSSVVTVPSSSLGTQTYICNVNHKPSDTKVDEKVEPDSCDKTHTCPPCPAPPVAGPSVFLFPPKP
KDTLMISRTPEVTCVVVDVKHEDPEVKFNWYVDGVEVHNAKTKPREEEYNSTYRVVSVLTVLHQDWLNGKEYKCKVSNKALPA
PIEKTISKAKGQPREPQVYTLPPSREEMTKNQVSLTCDVSGFYPSDIAVEWESDGQPENNYKTTPPVLDSDGSFFLYSKLTVDKSRW
EQGDVFSCSVLHEALHSHYTQKSLSLSPGK
Chain 2 - IL23-A[IL23]_H1_Q39K/A141F_IgG1_PVA_/S267K/S364K/E357Q/M428L/N434S
SEQ ID NO: 1057
QVQLVQSGAEVKKPGSSVKVSCKASGYTFTDQTIHWMRKAPGQGLEWIGYIYPRDDSPKYNENFKGKVTITADKSTSTAYMELSS
LRSEDTAVYYCAIPDRSGYAWFIYWGQGTLVTVSS/ASTKGPSVFPLAPSSKSTSGGTAFLGCLVKDYFPEPVTVSWNSGALTSGV
HTFPAVLQSSGLYSLSSVVTVPSSSLGTQTYICNVNHKPSNTKVDKKVEPKSCDKTHTCPPCPAPPVAGPSVFLFPPKPKDTLMISRT
PEVTCVVVDVKHEDPEVKFNWYVDGVEVHNAKTKPREEQYNSTYRVVSVLTVLHQDWLNGKEYKCKVSNKALPAPIEKTISKA
KGQPREPQVYTLPPSREQMTKNQVKLTCLVKGFYPSDIAVEWESNGQPENNYKTTPPVLDSDGSFFLYSKLTVDKSRWQQGNVFS
CSVLHEALHSHYTQKSLSLSPGK
Chain 3 - 041[TL1a]_L1_Q38K/D122K/E123K Light Chain
SEQ ID NO: 1058
DIQMTQSPSSVSASVGDRVTITCRASEDIYSGLAWYQKKPGKSPKLLIYGASSLQDGVPSRFSGSGSGTDYTLTISSLQPEDFATYFC
QEGLKSPYTFGAGTKLEIK/RTVAAPSVFIFPPSKKQLKSGTASVVCLLNNFYPREAKVQWKVDNALQSGNSQESVTEQDSKDSTY
SLSSTLTLSKADYEKHKVYACEVTHQGLSSPVTKSFNRGEC
Chain 4 - IL23-A[IL23]_L1_Q38E/F118A Light Chain
SEQ ID NO: 1059
DIQMTQSPSSLSASVGDRVTITCKASRDVAIAVAWYQEKPGKVPKLLIYWASTRHTGVPSRFSGSGSRTDFTLTISSLQPEDVADYF
CHQYSSYPFTFGSGTKLEIK/RTVAAPSVFIAPPSDEQLKSGTASVVCLLNNFYPREAKVQWKVDNALQSGNSQESVTEQDSKDSTY
SLSSTLTLSKADYEKHKVYACEVTHQGLSSPVTKSFNRGEC
XENP49750 - 069[TL1a]_H1_Q39E/K213E/K218D_L1_Q38K/D122K/E123K Fab-IL23-
A[IL23]_H1_Q39K/A141F_L1_Q38E/F118A_Fab-IgG1_pI(-)_Isosteric_A_PVA_/
S267K/L368D/K370S/M428L/N434S-
IgG1_PVA_/S267K/S364K/E357Q/M428L/N434S
Chain - 069[TL1a]_H1_Q39E/K213E/K218D_IgG1_pI(-)_Isosteric_A_PVA_/
S267K/L368D/K370S/M428L/N434S
SEQ ID NO: 1060
EVQLVESGGGLVQPGGSLKLSCAASGFDIIDDYIHWVREASGKGLEWVGRIDPASANTKYVPSVKGRFTISADTSKNTAYLQMNSL
KTEDTAVYYCTRKGFAYWGQGTLVTVSS/ASTKGPSVFPLAPSSKSTSGGTAALGCLVKDYFPEPVTVSWNSGALTSGVHTFPAVL
QSSGLYSLSSVVTVPSSSLGTQTYICNVNHKPSDTKVDEKVEPDSCDKTHTCPPCPAPPVAGPSVFLFPPKPKDTLMISRTPEVTCVV
VDVKHEDPEVKFNWYVDGVEVHNAKTKPREEEYNSTYRVVSVLTVLHQDWLNGKEYKCKVSNKALPAPIEKTISKAKGQPREPQ
VYTLPPSREEMTKNQVSLTCDVSGFYPSDIAVEWESDGQPENNYKTTPPVLDSDGSFFLYSKLTVDKSRWEQGDVFSCSVLHEALH
SHYTQKSLSLSPGK
Chain 2 - IL23-A[IL23]_H1_Q39K/A141F_IgG1_PVA_/S267K/S364K/E357Q/M428L/N434S
SEQ ID NO: 1061
NIVMTQTPLSLSVTPGQPASISCKASENVGTYVSWYLKKPGQSPQLLIYGTSNRYTGVPDRFTGSGSATDFTLKISRVEAEDVGVYH
CGQSYRYPYTFGGGTKLEIK/RTVAAPSVFIFPPSKKQLKSGTASVVCLLNNFYPREAKVQWKVDNALQSGNSQESVTEQDSKDST
YSLSSTLTLSKADYEKHKVYACEVTHQGLSSPVTKSFNRGEC
Chain 3 - 069[TL1a]_L1_Q38K/D122K/E123K Light Chain
SEQ ID NO: 1062
QVQLVQSGAEVKKPGSSVKVSCKASGYTFTDQTIHWMRKAPGQGLEWIGYIYPRDDSPKYNENFKGKVTITADKSTSTAYMELSS
LRSEDTAVYYCAIPDRSGYAWFIYWGQGTLVTVSS/ASTKGPSVFPLAPSSKSTSGGTAFLGCLVKDYFPEPVTVSWNSGALTSGV
HTFPAVLQSSGLYSLSSVVTVPSSSLGTQTYICNVNHKPSNTKVDKKVEPKSCDKTHTCPPCPAPPVAGPSVFLFPPKPKDTLMISRT
PEVTCVVVDVKHEDPEVKFNWYVDGVEVHNAKTKPREEQYNSTYRVVSVLTVLHQDWLNGKEYKCKVSNKALPAPIEKTISKA
KGQPREPQVYTLPPSREQMTKNQVKLTCLVKGFYPSDIAVEWESNGQPENNYKTTPPVLDSDGSFFLYSKLTVDKSRWQQGNVFS
CSVLHEALHSHYTQKSLSLSPGK
Chain 4 - IL23-A[IL23]_L1_Q38E/F118A Light Chain
SEQ ID NO: 1063
DIQMTQSPSSLSASVGDRVTITCKASRDVAIAVAWYQEKPGKVPKLLIYWASTRHTGVPSRFSGSGSRTDFTLTISSLQPEDVADYF
CHQYSSYPFTFGSGTKLEIK/RTVAAPSVFIAPPSDEQLKSGTASVVCLLNNFYPREAKVQWKVDNALQSGNSQESVTEQDSKDSTY
SLSSTLTLSKADYEKHKVYACEVTHQGLSSPVTKSFNRGEC
XENP49751 - 111[TL1a]_H1_Q39E/K213E/K218D_L1_Q38K/D122K/E123K_Fab-IL23-
A[IL23]_H1_Q39K/A141F_L1_Q38E/F118A Fab-IgG1_pI(-)_Isosteric_A_PVA_/
S267K/L368D/K370S/M428L/N434S-
IgG1_PVA_/S267K/S364K/E357Q/M428L/N434S
Chain - 111[TL1a]_H1_Q39E/K213E/K218D_IgG1_pI(-)_Isosteric_A_PVA_/
S267K/L368D/K370S/M428L/N434S
SEQ ID NO: 1064
EVQLVESGGGLVQPGGSLRLSCAASGFTFSSFGMHWVREAPGKGLEWVSYISSGSTTIYYADSVKGRFTISRDNAKNSLYLQMNSL
RAEDTAVYYCARAPLLRGAMDYWGQGTLVTVSS/ASTKGPSVFPLAPSSKSTSGGTAALGCLVKDYFPEPVTVSWNSGALTSGVH
TFPAVLQSSGLYSLSSVVTVPSSSLGTQTYICNVNHKPSDTKVDEKVEPDSCDKTHTCPPCPAPPVAGPSVFLFPPKPKDTLMISRTP
EVTCVVVDVKHEDPEVKFNWYVDGVEVHNAKTKPREEEYNSTYRVVSVLTVLHQDWLNGKEYKCKVSNKALPAPIEKTISKAK
GQPREPQVYTLPPSREEMTKNQVSLTCDVSGFYPSDIAVEWESDGQPENNYKTTPPVLDSDGSFFLYSKLTVDKSRWEQGDVFSCS
VLHEALHSHYTQKSLSLSPGK
Chain 2 - IL23-A[IL23]_H1_Q39K/A141F_IgG1_PVA_/S267K/S364K/E357Q/M428L/N434S
SEQ ID NO: 1065
QVQLVQSGAEVKKPGSSVKVSCKASGYTFTDQTIHWMRKAPGQGLEWIGYIYPRDDSPKYNENFKGKVTITADKSTSTAYMELSS
LRSEDTAVYYCAIPDRSGYAWFIYWGQGTLVTVSS/ASTKGPSVFPLAPSSKSTSGGTAFLGCLVKDYFPEPVTVSWNSGALTSGV
HTFPAVLQSSGLYSLSSVVTVPSSSLGTQTYICNVNHKPSNTKVDKKVEPKSCDKTHTCPPCPAPPVAGPSVFLFPPKPKDTLMISRT
PEVTCVVVDVKHEDPEVKFNWYVDGVEVHNAKTKPREEQYNSTYRVVSVLTVLHQDWLNGKEYKCKVSNKALPAPIEKTISKA
KGQPREPQVYTLPPSREQMTKNQVKLTCLVKGFYPSDIAVEWESNGQPENNYKTTPPVLDSDGSFFLYSKLTVDKSRWQQGNVFS
CSVLHEALHSHYTQKSLSLSPGK
Chain 3 - 111[TL1a]_L1_Q38K/D122K/E123K Light Chain
SEQ ID NO: 1066
DIVMTQSPDSLAVSLGERATINCKASQDVSTAVVWYQKKPGQSPKLLIYWASTRHTGVPDRFTGSGSGTDYTLTISSLQAEDVAVY
HCQQHYSTPYTFGGGTKLEIK/RTVAAPSVFIFPPSKKQLKSGTASVVCLLNNFYPREAKVQWKVDNALQSGNSQESVTEQDSKDS
TYSLSSTLTLSKADYEKHKVYACEVTHQGLSSPVTKSFNRGEC
Chain 4 - IL23-A[IL23]_L1_Q38E/F118A Light Chain
SEQ ID NO: 1067
DIQMTQSPSSLSASVGDRVTITCKASRDVAIAVAWYQEKPGKVPKLLIYWASTRHTGVPSRFSGSGSRTDFTLTISSLQPEDVADYF
CHQYSSYPFTFGSGTKLEIK/RTVAAPSVFIAPPSDEQLKSGTASVVCLLNNFYPREAKVQWKVDNALQSGNSQESVTEQDSKDSTY
SLSSTLTLSKADYEKHKVYACEVTHQGLSSPVTKSFNRGEC
XENP50283 - IL23-A[IL23]_H1_Q39E/K213E/K218D_L1_Q38K/D122K/E123K Fab-
041[TL1a]_H1_Q39K/A141F_L1_Q38E/F118A_Fab-IgG1_pI(-) Isosteric_A_L234A/
L235A/P329A/L368D/K370S/M428L/N434S-
IgG1_L234A/L235A/P329A/S364K/E357Q/M428L/N434S
Chain - IL23-A[IL23]_H1_Q39E/K213E/K218D_IgG1_pI(-)_Isosteric_A_L234A/
L235A/P329A/L368D/K370S/M428L/N434S-
IgG1_L234A/L235A/P329A/S364K/E357Q/M428L/N434S
SEQ ID NO: 1068
QVQLVQSGAEVKKPGSSVKVSCKASGYTFTDQTIHWMREAPGQGLEWIGYIYPRDDSPKYNENFKGKVTITADKSTSTAYMELSS
LRSEDTAVYYCAIPDRSGYAWFIYWGQGTLVTVSS/ASTKGPSVFPLAPSSKSTSGGTAALGCLVKDYFPEPVTVSWNSGALTSGV
HTFPAVLQSSGLYSLSSVVTVPSSSLGTQTYICNVNHKPSDTKVDEKVEPDSCDKTHTCPPCPAPEAAGGPSVFLFPPKPKDTLMISR
TPEVTCVVVDVSHEDPEVKFNWYVDGVEVHNAKTKPREEEYNSTYRVVSVLTVLHQDWLNGKEYKCKVSNKALAAPIEKTISKA
KGQPREPQVYTLPPSREEMTKNQVSLTCDVSGFYPSDIAVEWESDGQPENNYKTTPPVLDSDGSFFLYSKLTVDKSRWEQGDVFSC
SVLHEALHSHYTQKSLSLSPGK
Chain 2 - 041[TL1a]_H1_Q39K/A141F_IgG1_L234A/L235A/P329A/S364K/E357Q/M428L/N434S
SEQ ID NO: 1069
QVQLVQSGAEVKKPGASVKVSCKVSGFSVTSYNVHWVRKAPGQGLEWMGVMWSGGNTDYNSKFQGRVTMTRDTSTNTVYME
LSSLRSEDTAVYYCARAGRYYHDSNYYWDFPYWGQGTLVTVSS/ASTKGPSVFPLAPSSKSTSGGTAFLGCLVKDYFPEPVTVSW
NSGALTSGVHTFPAVLQSSGLYSLSSVVTVPSSSLGTQTYICNVNHKPSNTKVDKKVEPKSCDKTHTCPPCPAPEAAGGPSVFLFPP
KPKDTLMISRTPEVTCVVVDVSHEDPEVKFNWYVDGVEVHNAKTKPREEQYNSTYRVVSVLTVLHQDWLNGKEYKCKVSNKAL
AAPIEKTISKAKGQPREPQVYTLPPSREQMTKNQVKLTCLVKGFYPSDIAVEWESNGQPENNYKTTPPVLDSDGSFFLYSKLTVDK
SRWQQGNVFSCSVLHEALHSHYTQKSLSLSPGK
Chain 3 - IL23-A[IL23]_L1_Q38K/D122K/E123K Light Chain
SEQ ID NO: 1070
DIQMTQSPSSLSASVGDRVTITCKASRDVAIAVAWYQKKPGKVPKLLIYWASTRHTGVPSRFSGSGSRTDFTLTISSLQPEDVADYF
CHQYSSYPFTFGSGTKLEIK/RTVAAPSVFIFPPSKKQLKSGTASVVCLLNNFYPREAKVQWKVDNALQSGNSQESVTEQDSKDSTY
SLSSTLTLSKADYEKHKVYACEVTHQGLSSPVTKSFNRGEC
Chain 4 - 041[TL1a]_L1_Q38E/F118A Light Chain
SEQ ID NO: 1071
DIQMTQSPSSVSASVGDRVTITCRASEDIYSGLAWYQEKPGKSPKLLIYGASSLQDGVPSRFSGSGSGTDYTLTISSLQPEDFATYFC
QEGLKSPYTFGAGTKLEIK/RTVAAPSVFIAPPSDEQLKSGTASVVCLLNNFYPREAKVQWKVDNALQSGNSQESVTEQDSKDSTY
SLSSTLTLSKADYEKHKVYACEVTHQGLSSPVTKSFNRGEC
XENP51726 - 041[TL1a]_H1.3_Q39E/K213E/K218D_L1_Q38K/D122K/E123K_Fab-IL23-
A[IL23]_H1_Q39K/A141F_L1_Q38E/F118A Fab-IgG1_pI(-)_Isosteric_A_PVA_/
S267K/L368D/K370S/M428L/N434S-
IgG1_PVA_/S267K/S364K/E357Q/M428L/N434S
Chain - 041[TL1a]_H1.3_Q39E/K213E/K218D_IgG1_pI(-)_Isosteric_A_PVA_/
S267K/L368D/K370S/M428L/N434S SEQ ID NO: 1072
QVQLVQSGAEVKKPGASVKVSCKVSGFSVTSYNVHWVREAPGQGLEWMGVMWSGGNTDYNDKFQGRVTMTRDTSTNTVYME
LSSLRSEDTAVYYCARAGRYYHDSNYYWDFPYWGQGTLVTVSS/ASTKGPSVFPLAPSSKSTSGGTAALGCLVKDYFPEPVTVSW
NSGALTSGVHTFPAVLQSSGLYSLSSVVTVPSSSLGTQTYICNVNHKPSDTKVDEKVEPDSCDKTHTCPPCPAPPVAGPSVFLFPPKP
KDTLMISRTPEVTCVVVDVKHEDPEVKFNWYVDGVEVHNAKTKPREEEYNSTYRVVSVLTVLHQDWLNGKEYKCKVSNKALPA
PIEKTISKAKGQPREPQVYTLPPSREEMTKNQVSLTCDVSGFYPSDIAVEWESDGQPENNYKTTPPVLDSDGSFFLYSKLTVDKSRW
EQGDVFSCSVLHEALHSHYTQKSLSLSPGK
Chain 2 - IL23-A[IL23]_H1_Q39K/A141F_IgG1_PVA_/S267K/S364K/E357Q/M428L/N434S
SEQ ID NO: 1073
QVQLVQSGAEVKKPGSSVKVSCKASGYTFTDQTIHWMRKAPGQGLEWIGYIYPRDDSPKYNENFKGKVTITADKSTSTAYMELSS
LRSEDTAVYYCAIPDRSGYAWFIYWGQGTLVTVSS/ASTKGPSVFPLAPSSKSTSGGTAFLGCLVKDYFPEPVTVSWNSGALTSGV
HTFPAVLQSSGLYSLSSVVTVPSSSLGTQTYICNVNHKPSNTKVDKKVEPKSCDKTHTCPPCPAPPVAGPSVFLFPPKPKDTLMISRT
PEVTCVVVDVKHEDPEVKFNWYVDGVEVHNAKTKPREEQYNSTYRVVSVLTVLHQDWLNGKEYKCKVSNKALPAPIEKTISKA
KGQPREPQVYTLPPSREQMTKNQVKLTCLVKGFYPSDIAVEWESNGQPENNYKTTPPVLDSDGSFFLYSKLTVDKSRWQQGNVFS
CSVLHEALHSHYTQKSLSLSPGK
Chain 3 - 041[TL1a]_L1_Q38K/D122K/E123K Light Chain
SEQ ID NO: 1074
DIQMTQSPSSVSASVGDRVTITCRASEDIYSGLAWYQKKPGKSPKLLIYGASSLQDGVPSRFSGSGSGTDYTLTISSLQPEDFATYFC
QEGLKSPYTFGAGTKLEIK/RTVAAPSVFIFPPSKKQLKSGTASVVCLLNNFYPREAKVQWKVDNALQSGNSQESVTEQDSKDSTY
SLSSTLTLSKADYEKHKVYACEVTHQGLSSPVTKSFNRGEC
Chain 4 - IL23-A[IL23]_L1_Q38E/F118A Light Chain
SEQ ID NO: 1075
DIQMTQSPSSLSASVGDRVTITCKASRDVAIAVAWYQEKPGKVPKLLIYWASTRHTGVPSRFSGSGSRTDFTLTISSLQPEDVADYF
CHQYSSYPFTFGSGTKLEIK/RTVAAPSVFIAPPSDEQLKSGTASVVCLLNNFYPREAKVQWKVDNALQSGNSQESVTEQDSKDSTY
SLSSTLTLSKADYEKHKVYACEVTHQGLSSPVTKSFNRGEC
XENP51727 - IL23-A[IL23]_H1_Q39E/K213E/K218D_L1_Q38K/D122K/E123K_Fab-
041[TL1a]_H1.3_Q39K/A141F_L1_Q38E/F118A_Fab-IgG1_pI(-)_Isosteric_A_PVA_/
S267K/L368D/K370S/M428L/N434S-
IgG1_PVA_/S267K/S364K/E357Q/M428L/N434S
Chain - IL23-A[IL23]_H1_Q39E/K213E/K218D_IgG1_pI(-)_Isosteric_A_PVA_/
S267K/L368D/K370S/M428L/N434S SEQ ID NO: 1076
QVQLVQSGAEVKKPGSSVKVSCKASGYTFTDQTIHWMREAPGQGLEWIGYIYPRDDSPKYNENFKGKVTITADKSTSTAYMELSS
LRSEDTAVYYCAIPDRSGYAWFIYWGQGTLVTVSS/ASTKGPSVFPLAPSSKSTSGGTAALGCLVKDYFPEPVTVSWNSGALTSGV
HTFPAVLQSSGLYSLSSVVTVPSSSLGTQTYICNVNHKPSDTKVDEKVEPDSCDKTHTCPPCPAPPVAGPSVFLFPPKPKDTLMISRT
PEVTCVVVDVKHEDPEVKFNWYVDGVEVHNAKTKPREEEYNSTYRVVSVLTVLHQDWLNGKEYKCKVSNKALPAPIEKTISKA
KGQPREPQVYTLPPSREEMTKNQVSLTCDVSGFYPSDIAVEWESDGQPENNYKTTPPVLDSDGSFFLYSKLTVDKSRWEQGDVFSC
SVLHEALHSHYTQKSLSLSPGK
Chain 2 - 041[TL1a]_H1.3_Q39K/A141F_IgG1_PVA_/S267K/S364K/E357Q/M428L/N434S
SEQ ID NO: 1077
QVQLVQSGAEVKKPGASVKVSCKVSGFSVTSYNVHWVRKAPGQGLEWMGVMWSGGNTDYNDKFQGRVTMTRDTSTNTVYME
LSSLRSEDTAVYYCARAGRYYHDSNYYWDFPYWGQGTLVTVSS/ASTKGPSVFPLAPSSKSTSGGTAFLGCLVKDYFPEPVTVSW
NSGALTSGVHTFPAVLQSSGLYSLSSVVTVPSSSLGTQTYICNVNHKPSNTKVDKKVEPKSCDKTHTCPPCPAPPVAGPSVFLFPPK
PKDTLMISRTPEVTCVVVDVKHEDPEVKFNWYVDGVEVHNAKTKPREEQYNSTYRVVSVLTVLHQDWLNGKEYKCKVSNKALP
APIEKTISKAKGQPREPQVYTLPPSREQMTKNQVKLTCLVKGFYPSDIAVEWESNGQPENNYKTTPPVLDSDGSFFLYSKLTVDKSR
WQQGNVFSCSVLHEALHSHYTQKSLSLSPGK
Chain 3 - IL23-A[IL23]_L1_Q38K/D122K/E123K Light Chain
SEQ ID NO: 1078
DIQMTQSPSSLSASVGDRVTITCKASRDVAIAVAWYQKKPGKVPKLLIYWASTRHTGVPSRFSGSGSRTDFTLTISSLQPEDVADYF
CHQYSSYPFTFGSGTKLEIK/RTVAAPSVFIFPPSKKQLKSGTASVVCLLNNFYPREAKVQWKVDNALQSGNSQESVTEQDSKDSTY
SLSSTLTLSKADYEKHKVYACEVTHQGLSSPVTKSFNRGEC
Chain 4 - 041[TL1a]_H1.3_Q39K/A141F_L1_Q38E/F118A Light Chain
SEQ ID NO: 1079
DIQMTQSPSSVSASVGDRVTITCRASEDIYSGLAWYQEKPGKSPKLLIYGASSLQDGVPSRFSGSGSGTDYTLTISSLQPEDFATYFC
QEGLKSPYTFGAGTKLEIK/RTVAAPSVFIAPPSDEQLKSGTASVVCLLNNFYPREAKVQWKVDNALQSGNSQESVTEQDSKDSTY
SLSSTLTLSKADYEKHKVYACEVTHQGLSSPVTKSFNRGEC
XENP53089 - 041[TL1a]_H1_Q39E/K213E/K218D_L1_Q38K/D122K/E123K_Fab-IL23-
A[IL23]_H1_Q39K/A141F_L1_Q38E/F118A Fab-IgG1_pI(-)_Isosteric_A_PVA_/M252Y/
S254T/T256E/S267K/L368D/K370S-
IgG1_PVA_/M252Y/S254T/T256E/S267K/S364K/E357Q
Chain - 041[TL1a]_H1_Q39E/K213E/K218D_IgG1_pI(-)_Isosteric_A_PVA_/M252Y/
S254T/T256E/S267K/L368D/K370S SEQ ID NO: 1080
QVQLVQSGAEVKKPGASVKVSCKVSGFSVTSYNVHWVREAPGQGLEWMGVMWSGGNTDYNSKFQGRVTMTRDTSTNTVYME
LSSLRSEDTAVYYCARAGRYYHDSNYYWDFPYWGQGTLVTVSS/ASTKGPSVFPLAPSSKSTSGGTAALGCLVKDYFPEPVTVSW
NSGALTSGVHTFPAVLQSSGLYSLSSVVTVPSSSLGTQTYICNVNHKPSDTKVDEKVEPDSCDKTHTCPPCPAPPVAGPSVFLFPPKP
KDTLYITREPEVTCVVVDVKHEDPEVKFNWYVDGVEVHNAKTKPREEEYNSTYRVVSVLTVLHQDWLNGKEYKCKVSNKALPA
PIEKTISKAKGQPREPQVYTLPPSREEMTKNQVSLTCDVSGFYPSDIA VEWESDGQPENNYKTTPPVLDSDGSFFLYSKLTVDKSRW
EQGDVFSCSVMHEALHNHYTQKSLSLSPGK
Chain 2 - IL23-A[IL23]_H1_Q39K/A141F_IgG1_PVA_/M252Y/S254T/T256E/S267K/S364K/E357Q
SEQ ID NO: 1081
QVQLVQSGAEVKKPGSSVKVSCKASGYTFTDQTIHWMRKAPGQGLEWIGYIYPRDDSPKYNENFKGKVTITADKSTSTAYMELSS
LRSEDTAVYYCAIPDRSGYAWFIYWGQGTLVTVSS/ASTKGPSVFPLAPSSKSTSGGTAFLGCLVKDYFPEPVTVSWNSGALTSGV
HTFPAVLQSSGLYSLSSVVTVPSSSLGTQTYICNVNHKPSNTKVDKKVEPKSCDKTHTCPPCPAPPVAGPSVFLFPPKPKDTLYITRE
PEVTCVVVDVKHEDPEVKFNWYVDGVEVHNAKTKPREEQYNSTYRVVSVLTVLHQDWLNGKEYKCKVSNKALPAPIEKTISKA
KGQPREPQVYTLPPSREQMTKNQVKLTCLVKGFYPSDIAVEWESNGQPENNYKTTPPVLDSDGSFFLYSKLTVDKSRWQQGNVFS
CSVMHEALHNHYTQKSLSLSPGK
Chain 3 - 041[TL1a]_L1_Q38K/D122K/E123K Light Chain
SEQ ID NO: 1082
DIQMTQSPSSVSASVGDRVTITCRASEDIYSGLAWYQKKPGKSPKLLIYGASSLQDGVPSRFSGSGSGTDYTLTISSLQPEDFATYFC
QEGLKSPYTFGAGTKLEIK/RTVAAPSVFIFPPSKKQLKSGTASVVCLLNNFYPREAKVQWKVDNALQSGNSQESVTEQDSKDSTY
SLSSTLTLSKADYEKHKVYACEVTHQGLSSPVTKSFNRGEC
Chain 4 - IL23-A[IL23]_L1_Q38E/F118A Light Chain
SEQ ID NO: 1083
DIQMTQSPSSLSASVGDRVTITCKASRDVAIAVAWYQEKPGKVPKLLIYWASTRHTGVPSRFSGSGSRTDFTLTISSLQPEDVADYF
CHQYSSYPFTFGSGTKLEIK/RTVAAPSVFIAPPSDEQLKSGTASVVCLLNNFYPREAKVQWKVDNALQSGNSQESVTEQDSKDSTY
SLSSTLTLSKADYEKHKVYACEVTHQGLSSPVTKSFNRGEC
XENP53369 - 041[TL1a]_H1.324_Q39E/K213E/K218D_L1.27_Q38K/D122K/E123K Fab-IL23-
A[IL23]_H1_Q39K/A141F_L1.117_Q38E/F118A Fab-IgG1_pI(-)_Isosteric_A_PVA_/
S267K/L368D/K370S/M428L/N434S-
IgG1_PVA_/S267K/S364K/E357Q/M428L/N434S
Chain - 041[TL1a]_H1.324_Q39E/K213E/K218D_IgG1_pI(-)_Isosteric_A_PVA_/
S267K/L368D/K370S/M428L/N434S SEQ ID NO: 1084
QVQLVQSGAEVKKPGASVKVSCKVSGFPVTSYNVHWVREAPGQGLEWMGVMWYGGNTDYNSKFQGRVTMTRDTSTNTVYME
LSSLRSEDTAVYYCARAGRYYHDSNYYWDFPYWGQGTLVTVSS/ASTKGPSVFPLAPSSKSTSGGTAALGCLVKDYFPEPVTVSW
NSGALTSGVHTFPAVLQSSGLYSLSSVVTVPSSSLGTQTYICNVNHKPSDTKVDEKVEPDSCDKTHTCPPCPAPPVAGPSVFLFPPKP
KDTLMISRTPEVTCVVVDVKHEDPEVKFNWYVDGVEVHNAKTKPREEEYNSTYRVVSVLTVLHQDWLNGKEYKCKVSNKALPA
PIEKTISKAKGQPREPQVYTLPPSREEMTKNQVSLTCDVSGFYPSDIAVEWESDGQPENNYKTTPPVLDSDGSFFLYSKLTVDKSRW
EQGDVFSCSVLHEALHSHYTQKSLSLSPGK
Chain 2 - IL23-A[IL23]_H1_Q39K/A141F_IgG1_PVA_/S267K/S364K/E357Q/M428L/N434S
SEQ ID NO: 1085
QVQLVQSGAEVKKPGSSVKVSCKASGYTFTDQTIHWMRKAPGQGLEWIGYIYPRDDSPKYNENFKGKVTITADKSTSTAYMELSS
LRSEDTAVYYCAIPDRSGYAWFIYWGQGTLVTVSS/ASTKGPSVFPLAPSSKSTSGGTAFLGCLVKDYFPEPVTVSWNSGALTSGV
HTFPAVLQSSGLYSLSSVVTVPSSSLGTQTYICNVNHKPSNTKVDKKVEPKSCDKTHTCPPCPAPPVAGPSVFLFPPKPKDTLMISRT
PEVTCVVVDVKHEDPEVKFNWYVDGVEVHNAKTKPREEQYNSTYRVVSVLTVLHQDWLNGKEYKCKVSNKALPAPIEKTISKA
KGQPREPQVYTLPPSREQMTKNQVKLTCLVKGFYPSDIAVEWESNGQPENNYKTTPPVLDSDGSFFLYSKLTVDKSRWQQGNVFS
CSVLHEALHSHYTQKSLSLSPGK
Chain 3 - 041[TL1a]_L1.27_Q38K/D122K/E123K Light Chain
SEQ ID NO: 1086
DIQMTQSPSSVSASVGDRVTITCRASEDIYSGLAWYQKKPGKSPKLLIYGASSLQDGVPSRFSGSGSGTDYTLTISSLQPEDFATYFC
QEGLKSPYTFGQGTKLEIK/RTVAAPSVFIFPPSKKQLKSGTASVVCLLNNFYPREAKVQWKVDNALQSGNSQESVTEQDSKDSTY
SLSSTLTLSKADYEKHKVYACEVTHQGLSSPVTKSFNRGEC
Chain 4 - IL23-A[IL23]_L1.117_Q38E/F118A Light Chain
SEQ ID NO: 1087
DIQMTQSPSSLSASVGDRVTITCKASRDVAIAVAWYQEKPGKVPKLLIYWASVRHTGVPSRFSGSGSRTDFTLTISSLQPEDVADYF
CYQYSSYPFTFGSGTKLEIK/RTVAAPSVFIAPPSDEQLKSGTASVVCLLNNFYPREAKVQWKVDNALQSGNSQESVTEQDSKDSTY
SLSSTLTLSKADYEKHKVYACEVTHQGLSSPVTKSFNRGEC
XENP53370 - 041[TL1a]_H1.324_Q39E/K213E/K218D_L1.27_Q38K/D122K/E123K Fab-IL23-
A[IL23]_H1.187_Q39K/A141F_L1.116_Q38E/F118A Fab-IgG1_pI(-)_Isosteric_A_PVA_/
S267K/L368D/K370S/M428L/N434S-
IgG1_PVA_/S267K/S364K/E357Q/M428L/N434S
Chain - 041[TL1a]_H1.324_Q39E/K213E/K218D_IgG1_pI(-)_Isosteric_A_PVA_/
S267K/L368D/K370S/M428L/N434S SEQ ID NO: 1088
QVQLVQSGAEVKKPGASVKVSCKVSGFPVTSYNVHWVREAPGQGLEWMGVMWYGGNTDYNSKFQGRVTMTRDTSTNTVYME
LSSLRSEDTAVYYCARAGRYYHDSNYYWDFPYWGQGTLVTVSS/ASTKGPSVFPLAPSSKSTSGGTAALGCLVKDYFPEPVTVSW
NSGALTSGVHTFPAVLQSSGLYSLSSVVTVPSSSLGTQTYICNVNHKPSDTKVDEKVEPDSCDKTHTCPPCPAPPVAGPSVFLFPPKP
KDTLMISRTPEVTCVVVDVKHEDPEVKFNWYVDGVEVHNAKTKPREEEYNSTYRVVSVLTVLHQDWLNGKEYKCKVSNKALPA
PIEKTISKAKGQPREPQVYTLPPSREEMTKNQVSLTCDVSGFYPSDIAVEWESDGQPENNYKTTPPVLDSDGSFFLYSKLTVDKSRW
EQGDVFSCSVLHEALHSHYTQKSLSLSPGK
Chain 2 - IL23-A[IL23]_H1.187_Q39K/A141F_IgG1_PVA_/S267K/S364K/E357Q/M428L/N434S
SEQ ID NO: 1089
QVQLVQSGAEVKKPGSSVKVSCKASGYTFTDQTIHWMRKAPGQGLEWIGYIYPRDDSPKYNENFKGKVTITADKSTSTAYMELSS
LRSEDTAVYYCAIPDRSGYAFFIYWGQGTLVTVSS/ASTKGPSVFPLAPSSKSTSGGTAFLGCLVKDYFPEPVTVSWNSGALTSGVH
TFPAVLQSSGLYSLSSVVTVPSSSLGTQTYICNVNHKPSNTKVDKKVEPKSCDKTHTCPPCPAPPVAGPSVFLFPPKPKDTLMISRTP
EVTCVVVDVKHEDPEVKFNWYVDGVEVHNAKTKPREEQYNSTYRVVSVLTVLHQDWLNGKEYKCKVSNKALPAPIEKTISKAK
GQPREPQVYTLPPSREQMTKNQVKLTCLVKGFYPSDIAVEWESNGQPENNYKTTPPVLDSDGSFFLYSKLTVDKSRWQQGNVFSC
SVLHEALHSHYTQKSLSLSPGK
Chain 3 - 041[TL1a]_L1.27_Q38K/D122K/E123K Light Chain
SEQ ID NO: 1090
DIQMTQSPSSVSASVGDRVTITCRASEDIYSGLAWYQKKPGKSPKLLIYGASSLQDGVPSRFSGSGSGTDYTLTISSLQPEDFATYFC
QEGLKSPYTFGQGTKLEIK/RTVAAPSVFIFPPSKKQLKSGTASVVCLLNNFYPREAKVQWKVDNALQSGNSQESVTEQDSKDSTY
SLSSTLTLSKADYEKHKVYACEVTHQGLSSPVTKSFNRGEC
Chain 4 - IL23-A[IL23]_H1.187_Q39K/A141F_L1.116_Q38E/F118A Light Chain
SEQ ID NO: 1091
DIQMTQSPSSLSASVGDRVTITCKASRDVAIAVAWYQEKPGKVPKLLIYWASQRHTGVPSRFSGSGSRTDFTLTISSLQPEDVADYF
CYQYSSYPFTFGSGTKLEIK/RTVAAPSVFIAPPSDEQLKSGTASVVCLLNNFYPREAKVQWKVDNALQSGNSQESVTEQDSKDSTY
SLSSTLTLSKADYEKHKVYACEVTHQGLSSPVTKSFNRGEC
XENP53371 - 041[TL1a]_H1.324_Q39E/K213E/K218D_L1.27_Q38K/D122K/E123K Fab-IL23-
A[IL23]_H1.41_Q39K/A141F_L1.117_Q38E/F118A Fab-IgG1_pI(-)_Isosteric_A_PVA_/
S267K/L368D/K370S/M428L/N434S-
IgG1_PVA_/S267K/S364K/E357Q/M428L/N434S
Chain - 041[TL1a]_H1.324_Q39E/K213E/K218D_IgG1_pI(-)_Isosteric_A_PVA_/
S267K/L368D/K370S/M428L/N434S SEQ ID NO: 1092
QVQLVQSGAEVKKPGASVKVSCKVSGFPVTSYNVHWVREAPGQGLEWMGVMWYGGNTDYNSKFQGRVTMTRDTSTNTVYME
LSSLRSEDTAVYYCARAGRYYHDSNYYWDFPYWGQGTLVTVSS/ASTKGPSVFPLAPSSKSTSGGTAALGCLVKDYFPEPVTVSW
NSGALTSGVHTFPAVLQSSGLYSLSSVVTVPSSSLGTQTYICNVNHKPSDTKVDEKVEPDSCDKTHTCPPCPAPPVAGPSVFLFPPKP
KDTLMISRTPEVTCVVVDVKHEDPEVKFNWYVDGVEVHNAKTKPREEEYNSTYRVVSVLTVLHQDWLNGKEYKCKVSNKALPA
PIEKTISKAKGQPREPQVYTLPPSREEMTKNQVSLTCDVSGFYPSDIAVEWESDGQPENNYKTTPPVLDSDGSFFLYSKLTVDKSRW
EQGDVFSCSVLHEALHSHYTQKSLSLSPGK
Chain 2 - IL23-A[IL23]_H1.41_Q39K/A141F_IgG1_PVA_/S267K/S364K/E357Q/M428L/N434S
SEQ ID NO: 1093
QVQLVQSGAEVKKPGSSVKVSCKASGYTFTDQTLHWMRKAPGQGLEWIGYIYPRDDSPKYNENFKGKVTITADKSTSTAYMELS
SLRSEDTAVYYCAIPDRSGYAWFIYWGQGTLVTVSS/ASTKGPSVFPLAPSSKSTSGGTAFLGCLVKDYFPEPVTVSWNSGALTSGV
HTFPAVLQSSGLYSLSSVVTVPSSSLGTQTYICNVNHKPSNTKVDKKVEPKSCDKTHTCPPCPAPPVAGPSVFLFPPKPKDTLMISRT
PEVTCVVVDVKHEDPEVKFNWYVDGVEVHNAKTKPREEQYNSTYRVVSVLTVLHQDWLNGKEYKCKVSNKALPAPIEKTISKA
KGQPREPQVYTLPPSREQMTKNQVKLTCLVKGFYPSDIAVEWESNGQPENNYKTTPPVLDSDGSFFLYSKLTVDKSRWQQGNVFS
CSVLHEALHSHYTQKSLSLSPGK
Chain 3 - 041[TL1a]_L1.27_Q38K/D122K/E123K Light Chain
SEQ ID NO: 1094
DIQMTQSPSSVSASVGDRVTITCRASEDIYSGLAWYQKKPGKSPKLLIYGASSLQDGVPSRFSGSGSGTDYTLTISSLQPEDFATYFC
QEGLKSPYTFGQGTKLEIK/RTVAAPSVFIFPPSKKQLKSGTASVVCLLNNFYPREAKVQWKVDNALQSGNSQESVTEQDSKDSTY
SLSSTLTLSKADYEKHKVYACEVTHQGLSSPVTKSFNRGEC
Chain 4 - IL23-A[IL23]_H1.41_Q39K/A141F_L1.117_Q38E/F118A Light Chain
SEQ ID NO: 1095
DIQMTQSPSSLSASVGDRVTITCKASRDVAIAVAWYQEKPGKVPKLLIYWASVRHTGVPSRFSGSGSRTDFTLTISSLQPEDVADYF
CYQYSSYPFTFGSGTKLEIK/RTVAAPSVFIAPPSDEQLKSGTASVVCLLNNFYPREAKVQWKVDNALQSGNSQESVTEQDSKDSTY
SLSSTLTLSKADYEKHKVYACEVTHQGLSSPVTKSFNRGEC
XENP53372 - 041[TL1a]_H1.318_Q39E/K213E/K218D_L1.27_Q38K/D122K/E123K Fab-IL23-
A[IL23]_H1_Q39K/A141F_L1.117_Q38E/F118A Fab-IgG1_pI(-)_Isosteric_A_PVA_/
S267K/L368D/K370S/M428L/N434S-
IgG1_PVA_/S267K/S364K/E3570/M428L/N434S
Chain - 041[TL1a]_H1.318_Q39E/K213E/K218D_IgG1_pI(-)_Isosteric_A_PVA_/
S267K/L368D/K370S/M428L/N434S SEQ ID NO: 1096
QVQLVQSGAEVKKPGASVKVSCKVSGFSVTSYNVHWVREAPGQGLEWMGVMWFGGNTDYNSKFQGRVTMTRDTSTNTVYME
LSSLRSEDTAVYYCARAGRYYHDSNYYWDFPYWGQGTLVTVSS/ASTKGPSVFPLAPSSKSTSGGTAALGCLVKDYFPEPVTVSW
NSGALTSGVHTFPAVLQSSGLYSLSSVVTVPSSSLGTQTYICNVNHKPSDTKVDEKVEPDSCDKTHTCPPCPAPPVAGPSVFLFPPKP
KDTLMISRTPEVTCVVVDVKHEDPEVKFNWYVDGVEVHNAKTKPREEEYNSTYRVVSVLTVLHQDWLNGKEYKCKVSNKALPA
PIEKTISKAKGQPREPQVYTLPPSREEMTKNQVSLTCDVSGFYPSDIA VEWESDGQPENNYKTTPPVLDSDGSFFLYSKLTVDKSRW
EQGDVFSCSVLHEALHSHYTQKSLSLSPGK
Chain 2 - IL23-A[IL23]_H1_Q39K/A141F_IgG1_PVA_/S267K/S364K/E357Q/M428L/N434S
SEQ ID NO: 1097
QVQLVQSGAEVKKPGSSVKVSCKASGYTFTDQTIHWMRKAPGQGLEWIGYIYPRDDSPKYNENFKGKVTITADKSTSTAYMELSS
LRSEDTAVYYCAIPDRSGYAWFIYWGQGTLVTVSS/ASTKGPSVFPLAPSSKSTSGGTAFLGCLVKDYFPEPVTVSWNSGALTSGV
HTFPAVLQSSGLYSLSSVVTVPSSSLGTQTYICNVNHKPSNTKVDKKVEPKSCDKTHTCPPCPAPPVAGPSVFLFPPKPKDTLMISRT
PEVTCVVVDVKHEDPEVKFNWYVDGVEVHNAKTKPREEQYNSTYRVVSVLTVLHQDWLNGKEYKCKVSNKALPAPIEKTISKA
KGQPREPQVYTLPPSREQMTKNQVKLTCLVKGFYPSDIAVEWESNGQPENNYKTTPPVLDSDGSFFLYSKLTVDKSRWQQGNVFS
CSVLHEALHSHYTQKSLSLSPGK
Chain 3 - 041[TL1a]_L1.27_Q38K/D122K/E123K Light Chain
SEQ ID NO: 1098
DIQMTQSPSSVSASVGDRVTITCRASEDIYSGLAWYQKKPGKSPKLLIYGASSLQDGVPSRFSGSGSGTDYTLTISSLQPEDFATYFC
QEGLKSPYTFGQGTKLEIK/RTVAAPSVFIFPPSKKQLKSGTASVVCLLNNFYPREAKVQWKVDNALQSGNSQESVTEQDSKDSTY
SLSSTLTLSKADYEKHKVYACEVTHQGLSSPVTKSFNRGEC
Chain 4 - IL23-A[IL23]_L1.117_Q38E/F118A Light Chain
SEQ ID NO: 1099
DIQMTQSPSSLSASVGDRVTITCKASRDVAIAVAWYQEKPGKVPKLLIYWASVRHTGVPSRFSGSGSRTDFTLTISSLQPEDVADYF
CYQYSSYPFTFGSGTKLEIK/RTVAAPSVFIAPPSDEQLKSGTASVVCLLNNFYPREAKVQWKVDNALQSGNSQESVTEQDSKDSTY
SLSSTLTLSKADYEKHKVYACEVTHQGLSSPVTKSFNRGEC
XENP53373 - 041[TL1a]_H1.318_Q39E/K213E/K218D_L1.27_Q38K/D122K/E123K_Fab-IL23-
A[IL23]_H1.187_Q39K/A141F_L1.116_Q38E/F118A Fab-IgG1_pI(-)_Isosteric_A_PVA_/
S267K/L368D/K370S/M428L/N434S-
IgG1_PVA_/S267K/S364K/E357Q/M428L/N434S
Chain - 041[TL1a]_H1.318_Q39E/K213E/K218D_IgG1_pI(-)_Isosteric_A_PVA_/
S267K/L368D/K370S/M428L/N434S SEQ ID NO: 1100
QVQLVQSGAEVKKPGASVKVSCKVSGFSVTSYNVHWVREAPGQGLEWMGVMWFGGNTDYNSKFQGRVTMTRDTSTNTVYME
LSSLRSEDTAVYYCARAGRYYHDSNYYWDFPYWGQGTLVTVSS/ASTKGPSVFPLAPSSKSTSGGTAALGCLVKDYFPEPVTVSW
NSGALTSGVHTFPAVLQSSGLYSLSSVVTVPSSSLGTQTYICNVNHKPSDTKVDEKVEPDSCDKTHTCPPCPAPPVAGPSVFLFPPKP
KDTLMISRTPEVTCVVVDVKHEDPEVKFNWYVDGVEVHNAKTKPREEEYNSTYRVVSVLTVLHQDWLNGKEYKCKVSNKALPA
PIEKTISKAKGQPREPQVYTLPPSREEMTKNQVSLTCDVSGFYPSDIAVEWESDGQPENNYKTTPPVLDSDGSFFLYSKLTVDKSRW
EQGDVFSCSVLHEALHSHYTQKSLSLSPGK
Chain 2 - IL23-A[IL23]_H1.187_Q39K/A141F_IgG1_PVA_/S267K/S364K/E357Q/M428L/N434S
SEQ ID NO: 1101
QVQLVQSGAEVKKPGSSVKVSCKASGYTFTDQTIHWMRKAPGQGLEWIGYIYPRDDSPKYNENFKGKVTITADKSTSTAYMELSS
LRSEDTAVYYCAIPDRSGYAFFIYWGQGTLVTVSS/ASTKGPSVFPLAPSSKSTSGGTAFLGCLVKDYFPEPVTVSWNSGALTSGVH
TFPAVLQSSGLYSLSSVVTVPSSSLGTQTYICNVNHKPSNTKVDKKVEPKSCDKTHTCPPCPAPPVAGPSVFLFPPKPKDTLMISRTP
EVTCVVVDVKHEDPEVKFNWYVDGVEVHNAKTKPREEQYNSTYRVVSVLTVLHQDWLNGKEYKCKVSNKALPAPIEKTISKAK
GQPREPQVYTLPPSREQMTKNQVKLTCLVKGFYPSDIAVEWESNGQPENNYKTTPPVLDSDGSFFLYSKLTVDKSRWQQGNVFSC
SVLHEALHSHYTQKSLSLSPGK
Chain 3 - 041[TL1a]_L1.27_Q38K/D122K/E123K Light Chain
SEQ ID NO: 1102
DIQMTQSPSSVSASVGDRVTITCRASEDIYSGLAWYQKKPGKSPKLLIYGASSLQDGVPSRFSGSGSGTDYTLTISSLQPEDFATYFC
QEGLKSPYTFGQGTKLEIK/RTVAAPSVFIFPPSKKQLKSGTASVVCLLNNFYPREAKVQWKVDNALQSGNSQESVTEQDSKDSTY
SLSSTLTLSKADYEKHKVYACEVTHQGLSSPVTKSFNRGEC
Chain 4 - IL23-A[IL23]_H1.187_Q39K/A141F_L1.116_Q38E/F118A Light Chain
SEQ ID NO: 1103
DIQMTQSPSSLSASVGDRVTITCKASRDVAIAVAWYQEKPGKVPKLLIYWASQRHTGVPSRFSGSGSRTDFTLTISSLQPEDVADYF
CYQYSSYPFTFGSGTKLEIK/RTVAAPSVFIAPPSDEQLKSGTASVVCLLNNFYPREAKVQWKVDNALQSGNSQESVTEQDSKDSTY
SLSSTLTLSKADYEKHKVYACEVTHQGLSSPVTKSFNRGEC
XENP53374 - 041[TL1a]_H1.318_Q39E/K213E/K218D_L1.27_Q38K/D122K/E123K Fab-IL23-
A[IL23]_H1.41_Q39K/A141F_L1.117_Q38E/F118A Fab-IgG1_pI(-)_Isosteric_A_PVA_/
S267K/L368D/K370S/M428L/N434S-
IgG1_PVA_/S267K/S364K/E357Q/M428L/N434S
Chain - 041[TL1a]_H1.318_Q39E/K213E/K218D_IgG1_pI(-)_Isosteric_A_PVA_/
S267K/L368D/K370S/M428L/N434S SEQ ID NO: 1104
QVQLVQSGAEVKKPGASVKVSCKVSGFSVTSYNVHWVREAPGQGLEWMGVMWFGGNTDYNSKFQGRVTMTRDTSTNTVYME
LSSLRSEDTAVYYCARAGRYYHDSNYYWDFPYWGQGTLVTVSS/ASTKGPSVFPLAPSSKSTSGGTAALGCLVKDYFPEPVTVSW
NSGALTSGVHTFPAVLQSSGLYSLSSVVTVPSSSLGTQTYICNVNHKPSDTKVDEKVEPDSCDKTHTCPPCPAPPVAGPSVFLFPPKP
KDTLMISRTPEVTCVVVDVKHEDPEVKFNWYVDGVEVHNAKTKPREEEYNSTYRVVSVLTVLHQDWLNGKEYKCKVSNKALPA
PIEKTISKAKGQPREPQVYTLPPSREEMTKNQVSLTCDVSGFYPSDIAVEWESDGQPENNYKTTPPVLDSDGSFFLYSKLTVDKSRW
EQGDVFSCSVLHEALHSHYTQKSLSLSPGK
Chain 2 - IL23-A[IL23]_H1.41_Q39K/A141F_IgG1_PVA_/S267K/S364K/E357Q/M428L/N434S
SEQ ID NO: 1105
QVQLVQSGAEVKKPGSSVKVSCKASGYTFTDQTLHWMRKAPGQGLEWIGYIYPRDDSPKYNENFKGKVTITADKSTSTAYMELS
SLRSEDTAVYYCAIPDRSGYAWFIYWGQGTLVTVSS/ASTKGPSVFPLAPSSKSTSGGTAFLGCLVKDYFPEPVTVSWNSGALTSGV
HTFPAVLQSSGLYSLSSVVTVPSSSLGTQTYICNVNHKPSNTKVDKKVEPKSCDKTHTCPPCPAPPVAGPSVFLFPPKPKDTLMISRT
PEVTCVVVDVKHEDPEVKFNWYVDGVEVHNAKTKPREEQYNSTYRVVSVLTVLHQDWLNGKEYKCKVSNKALPAPIEKTISKA
KGQPREPQVYTLPPSREQMTKNQVKLTCLVKGFYPSDIAVEWESNGQPENNYKTTPPVLDSDGSFFLYSKLTVDKSRWQQGNVFS
CSVLHEALHSHYTQKSLSLSPGK
Chain 3 - 041[TL1a]_L1.27_Q38K/D122K/E123K Light Chain
SEQ ID NO: 1106
DIQMTQSPSSVSASVGDRVTITCRASEDIYSGLAWYQKKPGKSPKLLIYGASSLQDGVPSRFSGSGSGTDYTLTISSLQPEDFATYFC
QEGLKSPYTFGQGTKLEIK/RTVAAPSVFIFPPSKKQLKSGTASVVCLLNNFYPREAKVQWKVDNALQSGNSQESVTEQDSKDSTY
SLSSTLTLSKADYEKHKVYACEVTHQGLSSPVTKSFNRGEC
Chain 4 - IL23-A[IL23]_H1.41_Q39K/A141F_L1.117_Q38E/F118A Light Chain
SEQ ID NO: 1107
DIQMTQSPSSLSASVGDRVTITCKASRDVAIAVAWYQEKPGKVPKLLIYWASVRHTGVPSRFSGSGSRTDFTLTISSLQPEDVADYF
CYQYSSYPFTFGSGTKLEIK/RTVAAPSVFIAPPSDEQLKSGTASVVCLLNNFYPREAKVQWKVDNALQSGNSQESVTEQDSKDSTY
SLSSTLTLSKADYEKHKVYACEVTHQGLSSPVTKSFNRGEC
XENP53375 - 041[TL1a]_H1.447_Q39E/K213E/K218D_L1.27_Q38K/D122K/E123K_Fab-IL23-
A[IL23]_H1_Q39K/A141F_L1.117_Q38E/F118A_Fab-IgG1_pI(-)_Isosteric_A_PVA_/
S267K/L368D/K370S/M428L/N434S-
IgG1_PVA_/S267K/S364K/E357Q/M428L/N434S
Chain - 041[TL1a]_H1.447_Q39E/K213E/K218D_IgG1_pI(-)_Isosteric_A_PVA_/
S267K/L368D/K370S/M428L/N434S SEQ ID NO: 1108
QVQLVQSGAEVKKPGASVKVSCKVSGFSVTRYNVHWVREAPGQGLEWMGVMWSGANTDYNSKFQGRVTMTRDTSTNTVYME
LSSLRSEDTAVYYCARAGRYYVDSNYYWDFPYWGQGTLVTVSS/ASTKGPSVFPLAPSSKSTSGGTAALGCLVKDYFPEPVTVSW
NSGALTSGVHTFPAVLQSSGLYSLSSVVTVPSSSLGTQTYICNVNHKPSDTKVDEKVEPDSCDKTHTCPPCPAPPVAGPSVFLFPPKP
KDTLMISRTPEVTCVVVDVKHEDPEVKFNWYVDGVEVHNAKTKPREEEYNSTYRVVSVLTVLHQDWLNGKEYKCKVSNKALPA
PIEKTISKAKGQPREPQVYTLPPSREEMTKNQVSLTCDVSGFYPSDIAVEWESDGQPENNYKTTPPVLDSDGSFFLYSKLTVDKSRW
EQGDVFSCSVLHEALHSHYTQKSLSLSPGK
Chain 2 - IL23-A[IL23]_H1_Q39K/A141F_IgG1_PVA_/S267K/S364K/E357Q/M428L/N434S
SEQ ID NO: 1109
QVQLVQSGAEVKKPGSSVKVSCKASGYTFTDQTIHWMRKAPGQGLEWIGYIYPRDDSPKYNENFKGKVTITADKSTSTAYMELSS
LRSEDTAVYYCAIPDRSGYAWFIYWGQGTLVTVSS/ASTKGPSVFPLAPSSKSTSGGTAFLGCLVKDYFPEPVTVSWNSGALTSGV
HTFPAVLQSSGLYSLSSVVTVPSSSLGTQTYICNVNHKPSNTKVDKKVEPKSCDKTHTCPPCPAPPVAGPSVFLFPPKPKDTLMISRT
PEVTCVVVDVKHEDPEVKFNWYVDGVEVHNAKTKPREEQYNSTYRVVSVLTVLHQDWLNGKEYKCKVSNKALPAPIEKTISKA
KGQPREPQVYTLPPSREQMTKNQVKLTCLVKGFYPSDIAVEWESNGQPENNYKTTPPVLDSDGSFFLYSKLTVDKSRWQQGNVFS
CSVLHEALHSHYTQKSLSLSPGK
Chain 3 - 041[TL1a]_L1.27_Q38K/D122K/E123K Light Chain
SEQ ID NO: 1110
DIQMTQSPSSVSASVGDRVTITCRASEDIYSGLAWYQKKPGKSPKLLIYGASSLQDGVPSRFSGSGSGTDYTLTISSLQPEDFATYFC
QEGLKSPYTFGQGTKLEIK/RTVAAPSVFIFPPSKKQLKSGTASVVCLLNNFYPREAKVQWKVDNALQSGNSQESVTEQDSKDSTY
SLSSTLTLSKADYEKHKVYACEVTHQGLSSPVTKSFNRGEC
Chain 4 - IL23-A[IL23]_L1.117_Q38E/F118A Light Chain
SEQ ID NO: 1111
DIQMTQSPSSLSASVGDRVTITCKASRDVAIAVAWYQEKPGKVPKLLIYWASVRHTGVPSRFSGSGSRTDFTLTISSLQPEDVADYF
CYQYSSYPFTFGSGTKLEIK/RTVAAPSVFIAPPSDEQLKSGTASVVCLLNNFYPREAKVQWKVDNALQSGNSQESVTEQDSKDSTY
SLSSTLTLSKADYEKHKVYACEVTHQGLSSPVTKSFNRGEC
XENP53376 - 041[TL1a]_H1.447_Q39E/K213E/K218D_L1.27_Q38K/D122K/E123K Fab-IL23-
A[IL23]_H1.187_Q39K/A141F_L1.116_Q38E/F118A Fab-IgG1_pI(-)_Isosteric_A_PVA_/
S267K/L368D/K370S/M428L/N434S-
IgG1_PVA_/S267K/S364K/E357Q/M428L/N434S
Chain - 041[TL1a]_H1.447_Q39E/K213E/K218D_IgG1_pI(-)_Isosteric_A_PVA_/
S267K/L368D/K370S/M428L/N434S SEQ ID NO: 1112
QVQLVQSGAEVKKPGASVKVSCKVSGFSVTRYNVHWVREAPGQGLEWMGVMWSGANTDYNSKFQGRVTMTRDTSTNTVYME
LSSLRSEDTAVYYCARAGRYYVDSNYYWDFPYWGQGTLVTVSS/ASTKGPSVFPLAPSSKSTSGGTAALGCLVKDYFPEPVTVSW
NSGALTSGVHTFPAVLQSSGLYSLSSVVTVPSSSLGTQTYICNVNHKPSDTKVDEKVEPDSCDKTHTCPPCPAPPVAGPSVFLFPPKP
KDTLMISRTPEVTCVVVDVKHEDPEVKFNWYVDGVEVHNAKTKPREEEYNSTYRVVSVLTVLHQDWLNGKEYKCKVSNKALPA
PIEKTISKAKGQPREPQVYTLPPSREEMTKNQVSLTCDVSGFYPSDIAVEWESDGQPENNYKTTPPVLDSDGSFFLYSKLTVDKSRW
EQGDVFSCSVLHEALHSHYTQKSLSLSPGK
Chain 2 - IL23-A[IL23]_H1.187_Q39K/A141F_IgG1_PVA_/S267K/S364K/E357Q/M428L/N434S
SEQ ID NO: 1113
QVQLVQSGAEVKKPGSSVKVSCKASGYTFTDQTIHWMRKAPGQGLEWIGYIYPRDDSPKYNENFKGKVTITADKSTSTAYMELSS
LRSEDTAVYYCAIPDRSGYAFFIYWGQGTLVTVSS/ASTKGPSVFPLAPSSKSTSGGTAFLGCLVKDYFPEPVTVSWNSGALTSGVH
TFPAVLQSSGLYSLSSVVTVPSSSLGTQTYICNVNHKPSNTKVDKKVEPKSCDKTHTCPPCPAPPVAGPSVFLFPPKPKDTLMISRTP
EVTCVVVDVKHEDPEVKFNWYVDGVEVHNAKTKPREEQYNSTYRVVSVLTVLHQDWLNGKEYKCKVSNKALPAPIEKTISKAK
GQPREPQVYTLPPSREQMTKNQVKLTCLVKGFYPSDIAVEWESNGQPENNYKTTPPVLDSDGSFFLYSKLTVDKSRWQQGNVFSC
SVLHEALHSHYTQKSLSLSPGK
Chain 3 - 041[TL1a]_L1.27_Q38K/D122K/E123K Light Chain
SEQ ID NO: 1114
DIQMTQSPSSVSASVGDRVTITCRASEDIYSGLAWYQKKPGKSPKLLIYGASSLQDGVPSRFSGSGSGTDYTLTISSLQPEDFATYFC
QEGLKSPYTFGQGTKLEIK/RTVAAPSVFIFPPSKKQLKSGTASVVCLLNNFYPREAKVQWKVDNALQSGNSQESVTEQDSKDSTY
SLSSTLTLSKADYEKHKVYACEVTHQGLSSPVTKSFNRGEC
Chain 4 - IL23-A[IL23]_H1.187_Q39K/A141F_L1.116_Q38E/F118A Light Chain
SEQ ID NO: 1115
DIQMTQSPSSLSASVGDRVTITCKASRDVAIAVAWYQEKPGKVPKLLIYWASQRHTGVPSRFSGSGSRTDFTLTISSLQPEDVADYF
CYQYSSYPFTFGSGTKLEIK/RTVAAPSVFIAPPSDEQLKSGTASVVCLLNNFYPREAKVQWKVDNALQSGNSQESVTEQDSKDSTY
SLSSTLTLSKADYEKHKVYACEVTHQGLSSPVTKSFNRGEC
XENP53377 - 041[TL1a]_H1.447_Q39E/K213E/K218D_L1.27_Q38K/D122K/E123K Fab-IL23-
A[IL23]_H1.41_Q39K/A141F_L1.117_Q38E/F118A_Fab-IgG1_pI(-)_Isosteric_A_PVA_/
S267K/L368D/K370S/M428L/N434S-
IgG1_PVA_/S267K/S364K/E357Q/M428L/N434S
Chain - 041[TL1a]_H1.447_Q39E/K213E/K218D_IgG1_pI(-)_Isosteric_A_PVA_/
S267K/L368D/K370S/M428L/N434S SEQ ID NO: 1116
QVQLVQSGAEVKKPGASVKVSCKVSGFSVTRYNVHWVREAPGQGLEWMGVMWSGANTDYNSKFQGRVTMTRDTSTNTVYME
LSSLRSEDTAVYYCARAGRYYVDSNYYWDFPYWGQGTLVTVSS/ASTKGPSVFPLAPSSKSTSGGTAALGCLVKDYFPEPVTVSW
NSGALTSGVHTFPAVLQSSGLYSLSSVVTVPSSSLGTQTYICNVNHKPSDTKVDEKVEPDSCDKTHTCPPCPAPPVAGPSVFLFPPKP
KDTLMISRTPEVTCVVVDVKHEDPEVKFNWYVDGVEVHNAKTKPREEEYNSTYRVVSVLTVLHQDWLNGKEYKCKVSNKALPA
PIEKTISKAKGQPREPQVYTLPPSREEMTKNQVSLTCDVSGFYPSDIAVEWESDGQPENNYKTTPPVLDSDGSFFLYSKLTVDKSRW
EQGDVFSCSVLHEALHSHYTQKSLSLSPGK
Chain 2 - IL23-A[IL23]_H1.41_Q39K/A141F_IgG1_PVA_/S267K/S364K/E357Q/M428L/N434S
SEQ ID NO: 1117
QVQLVQSGAEVKKPGSSVKVSCKASGYTFTDQTLHWMRKAPGQGLEWIGYIYPRDDSPKYNENFKGKVTITADKSTSTAYMELS
SLRSEDTAVYYCAIPDRSGYAWFIYWGQGTLVTVSS/ASTKGPSVFPLAPSSKSTSGGTAFLGCLVKDYFPEPVTVSWNSGALTSGV
HTFPAVLQSSGLYSLSSVVTVPSSSLGTQTYICNVNHKPSNTKVDKKVEPKSCDKTHTCPPCPAPPVAGPSVFLFPPKPKDTLMISRT
PEVTCVVVDVKHEDPEVKFNWYVDGVEVHNAKTKPREEQYNSTYRVVSVLTVLHQDWLNGKEYKCKVSNKALPAPIEKTISKA
KGQPREPQVYTLPPSREQMTKNQVKLTCLVKGFYPSDIAVEWESNGQPENNYKTTPPVLDSDGSFFLYSKLTVDKSRWQQGNVFS
CSVLHEALHSHYTQKSLSLSPGK
Chain 3 - 041[TL1a]_L1.27_Q38K/D122K/E123K Light Chain
SEQ ID NO: 1118
DIQMTQSPSSVSASVGDRVTITCRASEDIYSGLAWYQKKPGKSPKLLIYGASSLQDGVPSRFSGSGSGTDYTLTISSLQPEDFATYFC
QEGLKSPYTFGQGTKLEIK/RTVAAPSVFIFPPSKKQLKSGTASVVCLLNNFYPREAKVQWKVDNALQSGNSQESVTEQDSKDSTY
SLSSTLTLSKADYEKHKVYACEVTHQGLSSPVTKSFNRGEC
Chain 4 - IL23-A[IL23]_H1.41_Q39K/A141F_L1.117_Q38E/F118A Light Chain
SEQ ID NO: 1119
DIQMTQSPSSLSASVGDRVTITCKASRDVAIAVAWYQEKPGKVPKLLIYWASVRHTGVPSRFSGSGSRTDFTLTISSLQPEDVADYF
CYQYSSYPFTFGSGTKLEIK/RTVAAPSVFIAPPSDEQLKSGTASVVCLLNNFYPREAKVQWKVDNALQSGNSQESVTEQDSKDSTY
SLSSTLTLSKADYEKHKVYACEVTHQGLSSPVTKSFNRGEC
XENP53378 - 041[TL1a]_H1.239_Q39E/K213E/K218D_L1.27_Q38K/D122K/E123K Fab-IL23-
A[IL23]_H1_Q39K/A141F_L1.117_Q38E/F118A Fab-IgG1_pI(-)_Isosteric_A_PVA_/
S267K/L368D/K370S/M428L/N434S-
IgG1_PVA_/S267K/S364K/E357Q/M428L/N434S
Chain - 041[TL1a]_H1.239_Q39E/K213E/K218D_IgG1_pI(-)_Isosteric_A_PVA_/
S267K/L368D/K370S/M428L/N434S SEQ ID NO: 1120
QVQLVQSGAEVKKPGASVKVSCKVSGFSVTSYNVHWVREAPGQGLEWMGVMWRGGNTDYNSKFQGRVTMTRDTSTNTVYME
LSSLRSEDTAVYYCARAGRYYHDSNYYWDFPYWGQGTLVTVSS/ASTKGPSVFPLAPSSKSTSGGTAALGCLVKDYFPEPVTVSW
NSGALTSGVHTFPAVLQSSGLYSLSSVVTVPSSSLGTQTYICNVNHKPSDTKVDEKVEPDSCDKTHTCPPCPAPPVAGPSVFLFPPKP
KDTLMISRTPEVTCVVVDVKHEDPEVKFNWYVDGVEVHNAKTKPREEEYNSTYRVVSVLTVLHQDWLNGKEYKCKVSNKALPA
PIEKTISKAKGQPREPQVYTLPPSREEMTKNQVSLTCDVSGFYPSDIAVEWESDGQPENNYKTTPPVLDSDGSFFLYSKLTVDKSRW
EQGDVFSCSVLHEALHSHYTQKSLSLSPGK
Chain 2 - IL23-A[IL23]_H1_Q39K/A141F_IgG1_PVA_/S267K/S364K/E357Q/M428L/N434S
SEQ ID NO: 1121
QVQLVQSGAEVKKPGSSVKVSCKASGYTFTDQTIHWMRKAPGQGLEWIGYIYPRDDSPKYNENFKGKVTITADKSTSTAYMELSS
LRSEDTAVYYCAIPDRSGYAWFIYWGQGTLVTVSS/ASTKGPSVFPLAPSSKSTSGGTAFLGCLVKDYFPEPVTVSWNSGALTSGV
HTFPAVLQSSGLYSLSSVVTVPSSSLGTQTYICNVNHKPSNTKVDKKVEPKSCDKTHTCPPCPAPPVAGPSVFLFPPKPKDTLMISRT
PEVTCVVVDVKHEDPEVKFNWYVDGVEVHNAKTKPREEQYNSTYRVVSVLTVLHQDWLNGKEYKCKVSNKALPAPIEKTISKA
KGQPREPQVYTLPPSREQMTKNQVKLTCLVKGFYPSDIAVEWESNGQPENNYKTTPPVLDSDGSFFLYSKLTVDKSRWQQGNVFS
CSVLHEALHSHYTQKSLSLSPGK
Chain 3 - 041[TL1a]_L1.27_Q38K/D122K/E123K Light Chain
SEQ ID NO: 1122
DIQMTQSPSSVSASVGDRVTITCRASEDIYSGLAWYQKKPGKSPKLLIYGASSLQDGVPSRFSGSGSGTDYTLTISSLQPEDFATYFC
QEGLKSPYTFGQGTKLEIK/RTVAAPSVFIFPPSKKQLKSGTASVVCLLNNFYPREAKVQWKVDNALQSGNSQESVTEQDSKDSTY
SLSSTLTLSKADYEKHKVYACEVTHQGLSSPVTKSFNRGEC
Chain 4 - IL23-A[IL23]_L1.117_Q38E/F118A Light Chain
SEQ ID NO: 1123
DIQMTQSPSSLSASVGDRVTITCKASRDVAIAVAWYQEKPGKVPKLLIYWASVRHTGVPSRFSGSGSRTDFTLTISSLQPEDVADYF
CYQYSSYPFTFGSGTKLEIK/RTVAAPSVFIAPPSDEQLKSGTASVVCLLNNFYPREAKVQWKVDNALQSGNSQESVTEQDSKDSTY
SLSSTLTLSKADYEKHKVYACEVTHQGLSSPVTKSFNRGEC
XENP53379 - 041[TL1a]_H1.239_Q39E/K213E/K218D_L1.27_Q38K/D122K/E123K Fab-IL23-
A[IL23]_H1.187_Q39K/A141F_L1.116_Q38E/F118A_Fab-IgG1_pI(-)_Isosteric_A_PVA_/
S267K/L368D/K370S/M428L/N434S-
IgG1_PVA_/S267K/S364K/E357Q/M428L/N434S
Chain - 041[TL1a]_H1.239_Q39E/K213E/K218D_IgG1_pI(-)_Isosteric_A_PVA_/
S267K/L368D/K370S/M428L/N434S SEQ ID NO: 1124
QVQLVQSGAEVKKPGASVKVSCKVSGFSVTSYNVHWVREAPGQGLEWMGVMWRGGNTDYNSKFQGRVTMTRDTSTNTVYME
LSSLRSEDTAVYYCARAGRYYHDSNYYWDFPYWGQGTLVTVSS/ASTKGPSVFPLAPSSKSTSGGTAALGCLVKDYFPEPVTVSW
NSGALTSGVHTFPAVLQSSGLYSLSSVVTVPSSSLGTQTYICNVNHKPSDTKVDEKVEPDSCDKTHTCPPCPAPPVAGPSVFLFPPKP
KDTLMISRTPEVTCVVVDVKHEDPEVKFNWYVDGVEVHNAKTKPREEEYNSTYRVVSVLTVLHQDWLNGKEYKCKVSNKALPA
PIEKTISKAKGQPREPQVYTLPPSREEMTKNQVSLTCDVSGFYPSDIAVEWESDGQPENNYKTTPPVLDSDGSFFLYSKLTVDKSRW
EQGDVFSCSVLHEALHSHYTQKSLSLSPGK
Chain 2 - IL23-A[IL23]_H1.187_Q39K/A141F_IgG1_PVA_/S267K/S364K/E357Q/M428L/N434S
SEQ ID NO: 1125
QVQLVQSGAEVKKPGSSVKVSCKASGYTFTDQTIHWMRKAPGQGLEWIGYIYPRDDSPKYNENFKGKVTITADKSTSTAYMELSS
LRSEDTAVYYCAIPDRSGYAFFIYWGQGTLVTVSS/ASTKGPSVFPLAPSSKSTSGGTAFLGCLVKDYFPEPVTVSWNSGALTSGVH
TFPAVLQSSGLYSLSSVVTVPSSSLGTQTYICNVNHKPSNTKVDKKVEPKSCDKTHTCPPCPAPPVAGPSVFLFPPKPKDTLMISRTP
EVTCVVVDVKHEDPEVKFNWYVDGVEVHNAKTKPREEQYNSTYRVVSVLTVLHQDWLNGKEYKCKVSNKALPAPIEKTISKAK
GQPREPQVYTLPPSREQMTKNQVKLTCLVKGFYPSDIAVEWESNGQPENNYKTTPPVLDSDGSFFLYSKLTVDKSRWQQGNVFSC
SVLHEALHSHYTQKSLSLSPGK
Chain 3 - 041[TL1a]_L1.27_Q38K/D122K/E123K Light Chain
SEQ ID NO: 1126
DIQMTQSPSSVSASVGDRVTITCRASEDIYSGLAWYQKKPGKSPKLLIYGASSLQDGVPSRFSGSGSGTDYTLTISSLQPEDFATYFC
QEGLKSPYTFGQGTKLEIK/RTVAAPSVFIFPPSKKQLKSGTASVVCLLNNFYPREAKVQWKVDNALQSGNSQESVTEQDSKDSTY
SLSSTLTLSKADYEKHKVYACEVTHQGLSSPVTKSFNRGEC
Chain 4 - IL23-A[IL23]_H1.187_Q39K/A141F_L1.116_Q38E/F118A Light Chain
SEQ ID NO: 1127
DIQMTQSPSSLSASVGDRVTITCKASRDVAIAVAWYQEKPGKVPKLLIYWASQRHTGVPSRFSGSGSRTDFTLTISSLQPEDVADYF
CYQYSSYPFTFGSGTKLEIK/RTVAAPSVFIAPPSDEQLKSGTASVVCLLNNFYPREAKVQWKVDNALQSGNSQESVTEQDSKDSTY
SLSSTLTLSKADYEKHKVYACEVTHQGLSSPVTKSFNRGEC
XENP53380 - 041[TL1a]_H1.239_Q39E/K213E/K218D_L1.27_Q38K/D122K/E123K_Fab-IL23-
A[IL23]_H1.41_Q39K/A141F_L1.117_Q38E/F118A Fab-IgG1 pI(-)_Isosteric_A_PVA_/
S267K/L368D/K370S/M428L/N434S-
IgG1_PVA_/S267K/S364K/E357Q/M428L/N434S
Chain - 041[TL1a]_H1.239_Q39E/K213E/K218D_IgG1_pI(-)_Isosteric_A_PVA_/
S267K/L368D/K370S/M428L/N434S SEQ ID NO: 1128
QVQLVQSGAEVKKPGASVKVSCKVSGFSVTSYNVHWVREAPGQGLEWMGVMWRGGNTDYNSKFQGRVTMTRDTSTNTVYME
LSSLRSEDTAVYYCARAGRYYHDSNYYWDFPYWGQGTLVTVSS/ASTKGPSVFPLAPSSKSTSGGTAALGCLVKDYFPEPVTVSW
NSGALTSGVHTFPAVLQSSGLYSLSSVVTVPSSSLGTQTYICNVNHKPSDTKVDEKVEPDSCDKTHTCPPCPAPPVAGPSVFLFPPKP
KDTLMISRTPEVTCVVVDVKHEDPEVKFNWYVDGVEVHNAKTKPREEEYNSTYRVVSVLTVLHQDWLNGKEYKCKVSNKALPA
PIEKTISKAKGQPREPQVYTLPPSREEMTKNQVSLTCDVSGFYPSDIAVEWESDGQPENNYKTTPPVLDSDGSFFLYSKLTVDKSRW
EQGDVFSCSVLHEALHSHYTQKSLSLSPGK
Chain 2 - IL23-A[IL23]_H1.41_Q39K/A141F_IgG1_PVA_/S267K/S364K/E357Q/M428L/N434S
SEQ ID NO: 1129
QVQLVQSGAEVKKPGSSVKVSCKASGYTFTDQTLHWMRKAPGQGLEWIGYIYPRDDSPKYNENFKGKVTITADKSTSTAYMELS
SLRSEDTAVYYCAIPDRSGYAWFIYWGQGTLVTVSS/ASTKGPSVFPLAPSSKSTSGGTAFLGCLVKDYFPEPVTVSWNSGALTSGV
HTFPAVLQSSGLYSLSSVVTVPSSSLGTQTYICNVNHKPSNTKVDKKVEPKSCDKTHTCPPCPAPPVAGPSVFLFPPKPKDTLMISRT
PEVTCVVVDVKHEDPEVKFNWYVDGVEVHNAKTKPREEQYNSTYRVVSVLTVLHQDWLNGKEYKCKVSNKALPAPIEKTISKA
KGQPREPQVYTLPPSREQMTKNQVKLTCLVKGFYPSDIAVEWESNGQPENNYKTTPPVLDSDGSFFLYSKLTVDKSRWQQGNVFS
CSVLHEALHSHYTQKSLSLSPGK
Chain 3 - 041[TL1a]_L1.27_Q38K/D122K/E123K Light Chain
SEQ ID NO: 1130
DIQMTQSPSSVSASVGDRVTITCRASEDIYSGLAWYQKKPGKSPKLLIYGASSLQDGVPSRFSGSGSGTDYTLTISSLQPEDFATYFC
QEGLKSPYTFGQGTKLEIK/RTVAAPSVFIFPPSKKQLKSGTASVVCLLNNFYPREAKVQWKVDNALQSGNSQESVTEQDSKDSTY
SLSSTLTLSKADYEKHKVYACEVTHQGLSSPVTKSFNRGEC
Chain 4 - IL23-A[IL23]_H1.41_Q39K/A141F_L1.117_Q38E/F118A Light Chain
SEQ ID NO: 1131
DIQMTQSPSSLSASVGDRVTITCKASRDVAIAVAWYQEKPGKVPKLLIYWASVRHTGVPSRFSGSGSRTDFTLTISSLQPEDVADYF
CYQYSSYPFTFGSGTKLEIK/RTVAAPSVFIAPPSDEQLKSGTASVVCLLNNFYPREAKVQWKVDNALQSGNSQESVTEQDSKDSTY
SLSSTLTLSKADYEKHKVYACEVTHQGLSSPVTKSFNRGEC
XENP53412 - 041[TL1a]_H1.337_Q39E/K213E/K218D_L1.27_Q38K/D122K/E123K_Fab-IL23-
A[IL23]_H1_Q39K/A141F_L1.117_Q38E/F118A_Fab-IgG1_pI(-) Isosteric_A_PVA_/
S267K/L368D/K370S/M428L/N434S-
IgG1_PVA_/S267K/S364K/E357Q/M428L/N434S
Chain - 041[TL1a]_H1.337_Q39E/K213E/K218D_IgG1_pI(-)_Isosteric_A_PVA_/
S267K/L368D/K370S/M428L/N434S SEQ ID NO: 1132
QVQLVQSGAEVKKPGASVKVSCKVSGFSVTSYNVHWVREAPGQGLEWMGVMWYGGNTDYNSKFQGRVTMTRDTSTNTVYME
LSSLRSEDTAVYYCARAGRYYVDSNYYWDFPYWGQGTLVTVSS/ASTKGPSVFPLAPSSKSTSGGTAALGCLVKDYFPEPVTVSW
NSGALTSGVHTFPAVLQSSGLYSLSSVVTVPSSSLGTQTYICNVNHKPSDTKVDEKVEPDSCDKTHTCPPCPAPPVAGPSVFLFPPKP
KDTLMISRTPEVTCVVVDVKHEDPEVKFNWYVDGVEVHNAKTKPREEEYNSTYRVVSVLTVLHQDWLNGKEYKCKVSNKALPA
PIEKTISKAKGQPREPQVYTLPPSREEMTKNQVSLTCDVSGFYPSDIAVEWESDGQPENNYKTTPPVLDSDGSFFLYSKLTVDKSRW
EQGDVFSCSVLHEALHSHYTQKSLSLSPGK
Chain 2 - IL23-A[IL23]_H1_Q39K/A141F_IgG1_PVA_/S267K/S364K/E357Q/M428L/N434S
SEQ ID NO: 1133
QVQLVQSGAEVKKPGSSVKVSCKASGYTFTDQTIHWMRKAPGQGLEWIGYIYPRDDSPKYNENFKGKVTITADKSTSTAYMELSS
LRSEDTAVYYCAIPDRSGYAWFIYWGQGTLVTVSS/ASTKGPSVFPLAPSSKSTSGGTAFLGCLVKDYFPEPVTVSWNSGALTSGV
HTFPAVLQSSGLYSLSSVVTVPSSSLGTQTYICNVNHKPSNTKVDKKVEPKSCDKTHTCPPCPAPPVAGPSVFLFPPKPKDTLMISRT
PEVTCVVVDVKHEDPEVKFNWYVDGVEVHNAKTKPREEQYNSTYRVVSVLTVLHQDWLNGKEYKCKVSNKALPAPIEKTISKA
KGQPREPQVYTLPPSREQMTKNQVKLTCLVKGFYPSDIAVEWESNGQPENNYKTTPPVLDSDGSFFLYSKLTVDKSRWQQGNVFS
CSVLHEALHSHYTQKSLSLSPGK
Chain 3 - 041[TL1a]_L1.27_Q38K/D122K/E123K Light Chain
SEQ ID NO: 1134
DIQMTQSPSSVSASVGDRVTITCRASEDIYSGLAWYQKKPGKSPKLLIYGASSLQDGVPSRFSGSGSGTDYTLTISSLQPEDFATYFC
QEGLKSPYTFGQGTKLEIK/RTVAAPSVFIFPPSKKQLKSGTASVVCLLNNFYPREAKVQWKVDNALQSGNSQESVTEQDSKDSTY
SLSSTLTLSKADYEKHKVYACEVTHQGLSSPVTKSFNRGEC
Chain 4 - IL23-A[IL23]_L1.117_Q38E/F118A Light Chain
SEQ ID NO: 1135
DIQMTQSPSSLSASVGDRVTITCKASRDVAIAVAWYQEKPGKVPKLLIYWASVRHTGVPSRFSGSGSRTDFTLTISSLQPEDVADYF
CYQYSSYPFTFGSGTKLEIK/RTVAAPSVFIAPPSDEQLKSGTASVVCLLNNFYPREAKVQWKVDNALQSGNSQESVTEQDSKDSTY
SLSSTLTLSKADYEKHKVYACEVTHQGLSSPVTKSFNRGEC
XENP53413 - 041[TL1a]_H1.337_Q39E/K213E/K218D_L1.27_Q38K/D122K/E123K_Fab-IL23-
A[IL23]_H1.187_Q39K/A141F_L1.116_Q38E/F118A_Fab-IgG1_pI(-)_Isosteric_A_PVA_/
S267K/L368D/K370S/M428L/N434S-
IgG1_PVA_/S267K/S364K/E357Q/M428L/N434S
Chain - 041[TL1a]_H1.337_Q39E/K213E/K218D_IgG1_pI(-)_Isosteric_A_PVA_/
S267K/L368D/K370S/M428L/N434S SEQ ID NO: 1136
QVQLVQSGAEVKKPGASVKVSCKVSGFSVTSYNVHWVREAPGQGLEWMGVMWYGGNTDYNSKFQGRVTMTRDTSTNTVYME
LSSLRSEDTAVYYCARAGRYYVDSNYYWDFPYWGQGTLVTVSS/ASTKGPSVFPLAPSSKSTSGGTAALGCLVKDYFPEPVTVSW
NSGALTSGVHTFPAVLQSSGLYSLSSVVTVPSSSLGTQTYICNVNHKPSDTKVDEKVEPDSCDKTHTCPPCPAPPVAGPSVFLFPPKP
KDTLMISRTPEVTCVVVDVKHEDPEVKFNWYVDGVEVHNAKTKPREEEYNSTYRVVSVLTVLHQDWLNGKEYKCKVSNKALPA
PIEKTISKAKGQPREPQVYTLPPSREEMTKNQVSLTCDVSGFYPSDIAVEWESDGQPENNYKTTPPVLDSDGSFFLYSKLTVDKSRW
EQGDVFSCSVLHEALHSHYTQKSLSLSPGK
Chain 2 - IL23-A[IL23]_H1.187_Q39K/A141F_IgG1_PVA_/S267K/S364K/E357Q/M428L/N434S
SEQ ID NO: 1137
QVQLVQSGAEVKKPGSSVKVSCKASGYTFTDQTIHWMRKAPGQGLEWIGYIYPRDDSPKYNENFKGKVTITADKSTSTAYMELSS
LRSEDTAVYYCAIPDRSGYAFFIYWGQGTLVTVSS/ASTKGPSVFPLAPSSKSTSGGTAFLGCLVKDYFPEPVTVSWNSGALTSGVH
TFPAVLQSSGLYSLSSVVTVPSSSLGTQTYICNVNHKPSNTKVDKKVEPKSCDKTHTCPPCPAPPVAGPSVFLFPPKPKDTLMISRTP
EVTCVVVDVKHEDPEVKFNWYVDGVEVHNAKTKPREEQYNSTYRVVSVLTVLHQDWLNGKEYKCKVSNKALPAPIEKTISKAK
GQPREPQVYTLPPSREQMTKNQVKLTCLVKGFYPSDIAVEWESNGQPENNYKTTPPVLDSDGSFFLYSKLTVDKSRWQQGNVFSC
SVLHEALHSHYTQKSLSLSPGK
Chain 3 - 041[TL1a]_L1.27_Q38K/D122K/E123K Light Chain
SEQ ID NO: 1138
DIQMTQSPSSVSASVGDRVTITCRASEDIYSGLAWYQKKPGKSPKLLIYGASSLQDGVPSRFSGSGSGTDYTLTISSLQPEDFATYFC
QEGLKSPYTFGQGTKLEIK/RTVAAPSVFIFPPSKKQLKSGTASVVCLLNNFYPREAKVQWKVDNALQSGNSQESVTEQDSKDSTY
SLSSTLTLSKADYEKHKVYACEVTHQGLSSPVTKSFNRGEC
Chain 4 - IL23-A[IL23]_H1.187_Q39K/A141F_L1.116_Q38E/F118A Light Chain
SEQ ID NO: 1139
DIQMTQSPSSLSASVGDRVTITCKASRDVAIAVAWYQEKPGKVPKLLIYWASQRHTGVPSRFSGSGSRTDFTLTISSLQPEDVADYF
CYQYSSYPFTFGSGTKLEIK/RTVAAPSVFIAPPSDEQLKSGTASVVCLLNNFYPREAKVQWKVDNALQSGNSQESVTEQDSKDSTY
SLSSTLTLSKADYEKHKVYACEVTHQGLSSPVTKSFNRGEC
XENP53414 - 041[TL1a]_H1.337_Q39E/K213E/K218D_L1.27_Q38K/D122K/E123K Fab-IL23-
A[IL23]_H1.41_Q39K/A141F_L1.117_Q38E/F118A Fab-IgG1_pI(-)_Isosteric_A_PVA_/
S267K/L368D/K370S/M428L/N434S-
IgG1_PVA_/S267K/S364K/E357Q/M428L/N434S
Chain - 041[TL1a]_H1.337_Q39E/K213E/K218D_IgG1_pI(-)_Isosteric_A_PVA_/
S267K/L368D/K370S/M428L/N434S SEQ ID NO: 1140
QVQLVQSGAEVKKPGASVKVSCKVSGFSVTSYNVHWVREAPGQGLEWMGVMWYGGNTDYNSKFQGRVTMTRDTSTNTVYME
LSSLRSEDTAVYYCARAGRYYVDSNYYWDFPYWGQGTLVTVSS/ASTKGPSVFPLAPSSKSTSGGTAALGCLVKDYFPEPVTVSW
NSGALTSGVHTFPAVLQSSGLYSLSSVVTVPSSSLGTQTYICNVNHKPSDTKVDEKVEPDSCDKTHTCPPCPAPPVAGPSVFLFPPKP
KDTLMISRTPEVTCVVVDVKHEDPEVKFNWYVDGVEVHNAKTKPREEEYNSTYRVVSVLTVLHQDWLNGKEYKCKVSNKALPA
PIEKTISKAKGQPREPQVYTLPPSREEMTKNQVSLTCDVSGFYPSDIAVEWESDGQPENNYKTTPPVLDSDGSFFLYSKLTVDKSRW
EQGDVFSCSVLHEALHSHYTQKSLSLSPGK
Chain 2 - IL23-A[IL23]_H1.41_Q39K/A141F_IgG1_PVA_/S267K/S364K/E357Q/M428L/N434S
SEQ ID NO: 1141
QVQLVQSGAEVKKPGSSVKVSCKASGYTFTDQTLHWMRKAPGQGLEWIGYIYPRDDSPKYNENFKGKVTITADKSTSTAYMELS
SLRSEDTAVYYCAIPDRSGYAWFIYWGQGTLVTVSS/ASTKGPSVFPLAPSSKSTSGGTAFLGCLVKDYFPEPVTVSWNSGALTSGV
HTFPAVLQSSGLYSLSSVVTVPSSSLGTQTYICNVNHKPSNTKVDKKVEPKSCDKTHTCPPCPAPPVAGPSVFLFPPKPKDTLMISRT
PEVTCVVVDVKHEDPEVKFNWYVDGVEVHNAKTKPREEQYNSTYRVVSVLTVLHQDWLNGKEYKCKVSNKALPAPIEKTISKA
KGQPREPQVYTLPPSREQMTKNQVKLTCLVKGFYPSDIAVEWESNGQPENNYKTTPPVLDSDGSFFLYSKLTVDKSRWQQGNVFS
CSVLHEALHSHYTQKSLSLSPGK
Chain 3 - 041[TL1a]_L1.27_Q38K/D122K/E123K Light Chain
SEQ ID NO: 1142
DIQMTQSPSSVSASVGDRVTITCRASEDIYSGLAWYQKKPGKSPKLLIYGASSLQDGVPSRFSGSGSGTDYTLTISSLQPEDFATYFC
QEGLKSPYTFGQGTKLEIK/RTVAAPSVFIFPPSKKQLKSGTASVVCLLNNFYPREAKVQWKVDNALQSGNSQESVTEQDSKDSTY
SLSSTLTLSKADYEKHKVYACEVTHQGLSSPVTKSFNRGEC
Chain 4 - IL23-A[IL23]_H1.41_Q39K/A141F_L1.117_Q38E/F118A Light Chain
SEQ ID NO: 1143
DIQMTQSPSSLSASVGDRVTITCKASRDVAIAVAWYQEKPGKVPKLLIYWASVRHTGVPSRFSGSGSRTDFTLTISSLQPEDVADYF
CYQYSSYPFTFGSGTKLEIK/RTVAAPSVFIAPPSDEQLKSGTASVVCLLNNFYPREAKVQWKVDNALQSGNSQESVTEQDSKDSTY
SLSSTLTLSKADYEKHKVYACEVTHQGLSSPVTKSFNRGEC
XENP55903 - 111[TL1a]_H1_Q39E/K213E/K218D_L1_Q38K/D122K/E123K_Fab-IL23-
A[IL23]_H1_Q39K/A141F_L1.117_Q38E/F118A Fab-IgG1_pI(-) Isosteric_A_PVA_/
S267K/L368D/K370S/M428L/N434S-
IgG1_PVA_/S267K/S364K/E357Q/M428L/N434S
Chain - 111[TL1a]_H1_Q39E/K213E/K218D_IgG1_pI(-)_Isosteric_A_PVA_/
S267K/L368D/K370S/M428L/N434S
SEQ ID NO: 1144
EVQLVESGGGLVQPGGSLRLSCAASGFTFSSFGMHWVREAPGKGLEWVSYISSGSTTIYYADSVKGRFTISRDNAKNSLYLQMNSL
RAEDTAVYYCARAPLLRGAMDYWGQGTLVTVSS/ASTKGPSVFPLAPSSKSTSGGTAALGCLVKDYFPEPVTVSWNSGALTSGVH
TFPAVLQSSGLYSLSSVVTVPSSSLGTQTYICNVNHKPSDTKVDEKVEPDSCDKTHTCPPCPAPPVAGPSVFLFPPKPKDTLMISRTP
EVTCVVVDVKHEDPEVKFNWYVDGVEVHNAKTKPREEEYNSTYRVVSVLTVLHQDWLNGKEYKCKVSNKALPAPIEKTISKAK
GQPREPQVYTLPPSREEMTKNQVSLTCDVSGFYPSDIAVEWESDGQPENNYKTTPPVLDSDGSFFLYSKLTVDKSRWEQGDVFSCS
VLHEALHSHYTQKSLSLSPGK
Chain 2 - IL23-A[IL23]_H1_Q39K/A141F_IgG1_PVA_/S267K/S364K/E357Q/M428L/N434S
SEQ ID NO: 1145
QVQLVQSGAEVKKPGSSVKVSCKASGYTFTDQTIHWMRKAPGQGLEWIGYIYPRDDSPKYNENFKGKVTITADKSTSTAYMELSS
LRSEDTAVYYCAIPDRSGYAWFIYWGQGTLVTVSS/ASTKGPSVFPLAPSSKSTSGGTAFLGCLVKDYFPEPVTVSWNSGALTSGV
HTFPAVLQSSGLYSLSSVVTVPSSSLGTQTYICNVNHKPSNTKVDKKVEPKSCDKTHTCPPCPAPPVAGPSVFLFPPKPKDTLMISRT
PEVTCVVVDVKHEDPEVKFNWYVDGVEVHNAKTKPREEQYNSTYRVVSVLTVLHQDWLNGKEYKCKVSNKALPAPIEKTISKA
KGQPREPQVYTLPPSREQMTKNQVKLTCLVKGFYPSDIAVEWESNGQPENNYKTTPPVLDSDGSFFLYSKLTVDKSRWQQGNVFS
CSVLHEALHSHYTQKSLSLSPGK
Chain 3 - 111[TL1a]_L1_Q38K/D122K/E123K Light Chain
SEQ ID NO: 1146
DIVMTQSPDSLAVSLGERATINCKASQDVSTAVVWYQKKPGQSPKLLIYWASTRHTGVPDRFTGSGSGTDYTLTISSLQAEDVAVY
HCQQHYSTPYTFGGGTKLEIK/RTVAAPSVFIFPPSKKQLKSGTASVVCLLNNFYPREAKVQWKVDNALQSGNSQESVTEQDSKDS
TYSLSSTLTLSKADYEKHKVYACEVTHQGLSSPVTKSFNRGEC
Chain 4 - IL23-A[IL23]_L1.117_Q38E/F118A Light Chain
SEQ ID NO: 1147
DIQMTQSPSSLSASVGDRVTITCKASRDVAIAVAWYQEKPGKVPKLLIYWASVRHTGVPSRFSGSGSRTDFTLTISSLQPEDVADYF
CYQYSSYPFTFGSGTKLEIK/RTVAAPSVFIAPPSDEQLKSGTASVVCLLNNFYPREAKVQWKVDNALQSGNSQESVTEQDSKDSTY
SLSSTLTLSKADYEKHKVYACEVTHQGLSSPVTKSFNRGEC
XENP55904 - 111[TL1a]_H1_Q39E/K213E/K218D_L1_Q38K/D122K/E123K_Fab-IL23-
A[IL23]_H1.187_Q39K/A141F_L1.116_Q38E/F118A Fab-IgG1 pI(-)_Isosteric_A_PVA_/
S267K/L368D/K370S/M428L/N434S-
IgG1_PVA_/S267K/S364K/E357Q/M428L/N434S
Chain - 111[TL1a]_H1_Q39E/K213E/K218D_IgG1_pI(-)_Isosteric_A_PVA_/S267K/
L368D/K370S/M428L/N434S
SEQ ID NO: 1148
EVQLVESGGGLVQPGGSLRLSCAASGFTFSSFGMHWVREAPGKGLEWVSYISSGSTTIYYADSVKGRFTISRDNAKNSLYLQMNSL
RAEDTAVYYCARAPLLRGAMDYWGQGTLVTVSS/ASTKGPSVFPLAPSSKSTSGGTAALGCLVKDYFPEPVTVSWNSGALTSGVH
TFPAVLQSSGLYSLSSVVTVPSSSLGTQTYICNVNHKPSDTKVDEKVEPDSCDKTHTCPPCPAPPVAGPSVFLFPPKPKDTLMISRTP
EVTCVVVDVKHEDPEVKFNWYVDGVEVHNAKTKPREEEYNSTYRVVSVLTVLHQDWLNGKEYKCKVSNKALPAPIEKTISKAK
GQPREPQVYTLPPSREEMTKNQVSLTCDVSGFYPSDIAVEWESDGQPENNYKTTPPVLDSDGSFFLYSKLTVDKSRWEQGDVFSCS
VLHEALHSHYTQKSLSLSPGK
Chain 2 - IL23-A[IL23]_H1.187_Q39K/A141F_IgG1_PVA_/S267K/S364K/E357Q/M428L/N434S
SEQ ID NO: 1149
QVQLVQSGAEVKKPGSSVKVSCKASGYTFTDQTIHWMRKAPGQGLEWIGYIYPRDDSPKYNENFKGKVTITADKSTSTAYMELSS
LRSEDTAVYYCAIPDRSGYAFFIYWGQGTLVTVSS/ASTKGPSVFPLAPSSKSTSGGTAFLGCLVKDYFPEPVTVSWNSGALTSGVH
TFPAVLQSSGLYSLSSVVTVPSSSLGTQTYICNVNHKPSNTKVDKKVEPKSCDKTHTCPPCPAPPVAGPSVFLFPPKPKDTLMISRTP
EVTCVVVDVKHEDPEVKFNWYVDGVEVHNAKTKPREEQYNSTYRVVSVLTVLHQDWLNGKEYKCKVSNKALPAPIEKTISKAK
GQPREPQVYTLPPSREQMTKNQVKLTCLVKGFYPSDIA VEWESNGQPENNYKTTPPVLDSDGSFFLYSKLTVDKSRWQQGNVFSC
SVLHEALHSHYTQKSLSLSPGK
Chain 3 - 111[TL1a]_L1_Q38K/D122K/E123K Light Chain
SEQ ID NO: 1150
DIVMTQSPDSLAVSLGERATINCKASQDVSTAVVWYQKKPGQSPKLLIYWASTRHTGVPDRFTGSGSGTDYTLTISSLQAEDVAVY
HCQQHYSTPYTFGGGTKLEIK/RTVAAPSVFIFPPSKKQLKSGTASVVCLLNNFYPREAKVQWKVDNALQSGNSQESVTEQDSKDS
TYSLSSTLTLSKADYEKHKVYACEVTHQGLSSPVTKSFNRGEC
Chain 4 - IL23-A[IL23]_H1.187_Q39K/A141F_L1.116_Q38E/F118A Light Chain
SEQ ID NO: 1151
DIQMTQSPSSLSASVGDRVTITCKASRDVAIAVAWYQEKPGKVPKLLIYWASQRHTGVPSRFSGSGSRTDFTLTISSLQPEDVADYF
CYQYSSYPFTFGSGTKLEIK/RTVAAPSVFIAPPSDEQLKSGTASVVCLLNNFYPREAKVQWKVDNALQSGNSQESVTEQDSKDSTY
SLSSTLTLSKADYEKHKVYACEVTHQGLSSPVTKSFNRGEC
XENP56215 - 041[TL1a]_H1.337_Q39E/K213E/K218D_L1.27 Q38K/D122K/E123K Fab-IL23-
A[IL23]_H1_Q39K/A141F_L1.117_Q38E/F118A Fab-IgG1 pI(-)_Isosteric_A_PVA_/
S267K/L368D/K370S-IgG1_PVA_/S267K/S364K/E357Q
Chain - 041[TL1a]_H1.337_Q39E/K213E/K218D_IgG1_pI(-)_Isosteric_A_PVA_/
S267K/L368D/K370S
SEQ ID NO: 1152
QVQLVQSGAEVKKPGASVKVSCKVSGFSVTSYNVHWVREAPGQGLEWMGVMWYGGNTDYNSKFQGRVTMTRDTSTNTVYME
LSSLRSEDTAVYYCARAGRYYVDSNYYWDFPYWGQGTLVTVSS/ASTKGPSVFPLAPSSKSTSGGTAALGCLVKDYFPEPVTVSW
NSGALTSGVHTFPAVLQSSGLYSLSSVVTVPSSSLGTQTYICNVNHKPSDTKVDEKVEPDSCDKTHTCPPCPAPPVAGPSVFLFPPKP
KDTLMISRTPEVTCVVVDVKHEDPEVKFNWYVDGVEVHNAKTKPREEEYNSTYRVVSVLTVLHQDWLNGKEYKCKVSNKALPA
PIEKTISKAKGQPREPQVYTLPPSREEMTKNQVSLTCDVSGFYPSDIAVEWESDGQPENNYKTTPPVLDSDGSFFLYSKLTVDKSRW
EQGDVFSCSVMHEALHNHYTQKSLSLSPGK
Chain 2 - IL23-A[IL23]_H1_Q39K/A141F_IgG1_PVA_/S267K/S364K/E357Q
SEQ ID NO: 1153
QVQLVQSGAEVKKPGSSVKVSCKASGYTFTDQTIHWMRKAPGQGLEWIGYIYPRDDSPKYNENFKGKVTITADKSTSTAYMELSS
LRSEDTAVYYCAIPDRSGYAWFIYWGQGTLVTVSS/ASTKGPSVFPLAPSSKSTSGGTAFLGCLVKDYFPEPVTVSWNSGALTSGV
HTFPAVLQSSGLYSLSSVVTVPSSSLGTQTYICNVNHKPSNTKVDKKVEPKSCDKTHTCPPCPAPPVAGPSVFLFPPKPKDTLMISRT
PEVTCVVVDVKHEDPEVKFNWYVDGVEVHNAKTKPREEQYNSTYRVVSVLTVLHQDWLNGKEYKCKVSNKALPAPIEKTISKA
KGQPREPQVYTLPPSREQMTKNQVKLTCLVKGFYPSDIAVEWESNGQPENNYKTTPPVLDSDGSFFLYSKLTVDKSRWQQGNVFS
CSVMHEALHNHYTQKSLSLSPGK
Chain 3 - 041[TL1a]_L1.27_Q38K/D122K/E123K Light Chain
SEQ ID NO: 1154
DIQMTQSPSSVSASVGDRVTITCRASEDIYSGLAWYQKKPGKSPKLLIYGASSLQDGVPSRFSGSGSGTDYTLTISSLQPEDFATYFC
QEGLKSPYTFGQGTKLEIK/RTVAAPSVFIFPPSKKQLKSGTASVVCLLNNFYPREAKVQWKVDNALQSGNSQESVTEQDSKDSTY
SLSSTLTLSKADYEKHKVYACEVTHQGLSSPVTKSFNRGEC
Chain 4 - IL23-A[IL23]_L1.117_Q38E/F118A Light Chain
SEQ ID NO: 1155
DIQMTQSPSSLSASVGDRVTITCKASRDVAIAVAWYQEKPGKVPKLLIYWASVRHTGVPSRFSGSGSRTDFTLTISSLQPEDVADYF
CYQYSSYPFTFGSGTKLEIK/RTVAAPSVFIAPPSDEQLKSGTASVVCLLNNFYPREAKVQWKVDNALQSGNSQESVTEQDSKDSTY
SLSSTLTLSKADYEKHKVYACEVTHQGLSSPVTKSFNRGEC

TABLE 30

| | SEQ ID NO \| Antigen | | | | | | | |
|---|---|---|---|---|---|---|---|---|
| Xencor ID | Chain 1 | | Chain 2 | | Chain 3 | | Chain 4 | |
| XENC001 | 2272 | TL1A | 2273 | IL23 | 2274 | TL1A | 2275 | IL23 |
| XENC002 | 2276 | TL1A | 2277 | IL23 | 2278 | TL1A | 2279 | IL23 |
| XENC003 | 2280 | TL1A | 2281 | IL23 | 2282 | TL1A | 2283 | IL23 |
| XENC004 | 2284 | TL1A | 2285 | IL23 | 2286 | TL1A | 2287 | IL23 |
| XENC005 | 2288 | TL1A | 2289 | IL23 | 2290 | TL1A | 2291 | IL23 |
| XENC006 | 2292 | TL1A | 2293 | IL23 | 2294 | TL1A | 2295 | IL23 |
| XENC007 | 2296 | TL1A | 2297 | IL23 | 2298 | TL1A | 2299 | IL23 |
| XENC008 | 2300 | TL1A | 2301 | IL23 | 2302 | TL1A | 2303 | IL23 |
| XENC009 | 2304 | TL1A | 2305 | IL23 | 2306 | TL1A | 2307 | IL23 |
| XENC010 | 2308 | TL1A | 2309 | IL23 | 2310 | TL1A | 2311 | IL23 |

### 3C: CrossMab 1+1 Format

[0565] Another heterodimeric antibody format that finds particular use in subject anti-TL1A×anti-IL23 antibodies provided herein is the “CrossMab 1+1” format (see FIG. 1, Panel Q). The CrossMab 1+1 format is a Fab×Fab four chain bispecific antibody. In some embodiments, the first monomer includes a first variable light domain (VL1) attached to a heavy chain constant domain comprising a CH1-hinge-CH2-CH3, wherein CH2-CH3 is a first Fc domain; and the second monomer includes a first variable heavy domain (VH1) attached to a lambda constant light domain (e.g., a CLκ). In some embodiments, the first monomer includes a first variable heavy domain (VH1) attached to a lambda constant light domain attached to CH2-CH3 via a domain linker; and the second monomer includes a first variable light domain (VL1) attached to a CH1-partial hinge. The third monomer comprises a canonical heavy chain that includes a VH2-CH1-hinge-CH2-CH3, wherein VH2 is a second variable heavy domain and CH2-CH3 is a second Fc domain. The fourth monomer comprises a canonical light chain that includes a VL2-CL, wherein VL2 is a second variable light domain and CL is a constant light domain (e.g., a CLκ). The first monomer and second monomer form a “crossed” arm, wherein VL1 and VH1 form a first antigen binding domain that binds a first antigen, and the third monomer and forth monomer form a “non-crossed” arm, wherein VL2 and VH2 form a second antigen binding domain that binds a second antigen.

### 3C(1): CrossMab-VH-VL Charge-Swap 1+1 Format

[0566] In some embodiments, the CH1 of the first monomer and the CL domain (e.g., CLκ) of the fourth monomer further include “charge” swap amino acid substitutions. In some embodiments, these “charge” swap substitutions comprise amino acid substitutions K213E/K218D (EU numbering) in the CH1 of the third monomer, and the fourth monomer CL is a CLκ that comprises amino acid substitutions D112K/E123K (Kabat numbering).

[0567] Without being bound by any particular theory of operation, it is believed that the crossing of one arm (i.e., the “crossed” arm) and charge swap engineering on the “non-crossed” arm in this format greatly diminishes the mispairing of LCs without affecting the various other developability and biophysical parameters that might be used in development of a biological therapeutic.

[0568] In some embodiments, the constant light domain of the second monomer includes amino acid substitutions R108A/T109S (Kabat numbering). In some embodiments, the VL1 of the first monomer is attached to the CH1 of the first monomer by an SS linker. In some embodiments, the “crossed” arm includes isosteric variants N208D/Q295E/N384D/Q418E/N421D in the heavy chain constant domain of the first monomer, wherein numbering is according to EU numbering.

[0569] In exemplary embodiments, the first variant Fc domain includes heterodimerization skew variants L368D/K370S and the second variant Fc domain includes heterodimerization skew variants S364K/E357Q; each of the first and second variant Fc domains include ablation variants E233P/L234V/L235A/G236_/S267K.

[0570] Exemplary anti-TL1A×anti-IL23 bispecific antibodies in the CrossMab 1+1 format are depicted in Table 31. CDRs are underlined and slashes indicate the border(s) between the variable regions, linkers, Fc regions, and constant domains. It should be noted that the TL1A×IL23 bsAbs can utilize variable region, Fc region, and constant domain sequences that are 90, 95, 98 and 99% identical (as defined herein), and/or contain from 1, 2, 3, 4, 5, 6, 7, 8, 9 or 10 amino acid substitutions. In addition, each sequence outlined herein can include or exclude the M428L/N434S or any other half-life extension variants and/or any other ablation variant (as depicted in Table 1) in one or preferably both Fc domains Additionally, each sequence can utilize any other heterodimeric Fc variant as depicted in Tables 12-17.

TABLE 31

| | SEQ ID NO \| Antigen | | | | | | | |
|---|---|---|---|---|---|---|---|---|
| Xencor ID | Chain 1 | | Chain 2 | | Chain 3 | | Chain 4 | |
| XENP51595 | 1176 | TL1A | 1177 | IL23 | 1178 | TL1A | 1179 | IL23 |
| XENP51596 | 1180 | TL1A | 1181 | IL23 | 1182 | TL1A | 1183 | IL23 |
| XENP51597 | 1184 | TL1A | 1185 | IL23 | 1186 | TL1A | 1187 | IL23 |
| XENP51598 | 1188 | IL23 | 1189 | TL1A | 1190 | IL23 | 1191 | TL1A |
| XENP51599 | 1192 | IL23 | 1193 | TL1A | 1194 | IL23 | 1195 | TL1A |
| XENP51600 | 1196 | IL23 | 1197 | TL1A | 1198 | IL23 | 1199 | TL1A |

[0571] Exemplary anti-TL1A×anti-IL23 bispecific antibodies in the CrossMab-VH-VL charge-swap 1+1 format are depicted in Table 32. CDRs are underlined and slashes indicate the border(s) between the variable regions, linkers, Fc regions, and constant domains. It should be noted that the TL1A×IL23 bsAbs can utilize variable region, Fc region, and constant domain sequences that are 90, 95, 98 and 99% identical (as defined herein), and/or contain from 1, 2, 3, 4, 5, 6, 7, 8, 9 or 10 amino acid substitutions. In addition, each sequence outlined herein can include or exclude the M428L/N434S or any other half-life extension variants and/or any other ablation variant (as depicted in Table 1) in one or preferably both Fc domains Additionally, each sequence can utilize any other heterodimeric Fc variant as depicted in Tables 12-17.

TABLE 32
XENP52515-041[TL1a]_H1_K147E/K213E_L1_E123R/Q124K_Fab-IL23-A[IL23]_L1_CH1_H1_Ckappa_crossMab_
VH_VL-IgG1_pI(-)_Isosteric_A_PVA_/S267K/L368D/K370S/M428L/N434S-IgG1_PVA/S267K/S364K/E357Q/
M428L/N434S
Chain 1-041[TL1a]_H1_K147E/K213E_IgG1_pI(-)_Isosteric_A_PVA_/S267K/L368D/K370S/M428L/
N434S SEQ ID NO: 1291
QVQLVQSGAEVKKPGASVKVSCKVSGFSVTSYNVHWVRQAPGQGLEWMGVMWSGGNTDYNSKFQGRVTMTRDTSTNTVYME
LSSLRSEDTAVYYCARAGRYYHDSNYYWDFPYWGQGTLVTVSS/ASTKGPSVFPLAPSSKSTSGGTAALGCLVEDYFPEPVTVSW
NSGALTSGVHTFPAVLQSSGLYSLSSVVTVPSSSLGTQTYICNVNHKPSDTKVDEKVEPKSCDKTHTCPPCPAPPVAGPSVFLFPPKP
KDTLMISRTPEVTCVVVDVKHEDPEVKFNWYVDGVEVHNAKTKPREEEYNSTYRVVSVLTVLHQDWLNGKEYKCKVSNKALPA
PIEKTISKAKGQPREPQVYTLPPSREEMTKNQVSLTCDVSGFYPSDIAVEWESDGQPENNYKTTPPVLDSDGSFFLYSKLTVDKSRW
EQGDVFSCSVLHEALHSHYTQKSLSLSPGK
Chain 2-IL23-A[IL23]_L1_CH1_IgG1_PVA_/S267K/S364K/E357Q/M428L/N434S SEQ ID NO: 1292
DIQMTQSPSSLSASVGDRVTITCKASRDVAIAVAWYQQKPGKVPKLLIYWASTRHTGVPSRFSGSGSRTDFTLTISSLQPEDVADYF
CHQYSSYPFTFGSGTKLEIKSS/ASTKGPSVFPLAPSSKSTSGGTAALGCLVKDYFPEPVTVSWNSGALTSGVHTFPAVLQSSGLYSL
SSVVTVPSSSLGTQTYICNVNHKPSNTKVDKKVEPKSCDKTHTCPPCPAPPVAGPSVFLFPPKPKDTLMISRTPEVTCVVVDVKHED
PEVKFNWYVDGVEVHNAKTKPREEQYNSTYRVVSVLTVLHQDWLNGKEYKCKVSNKALPAPIEKTISKAKGQPREPQVYTLPPS
REQMTKNQVKLTCLVKGFYPSDIAVEWESNGQPENNYKTTPPVLDSDGSFFLYSKLTVDKSRWQQGNVFSCSVLHEALHSHYTQ
KSLSLSPGK
Chain 3-041[TL1a]_L1_E123R/Q124K Light Chain SEQ ID NO: 1293
DIQMTQSPSSVSASVGDRVTITCRASEDIYSGLAWYQQKPGKSPKLLIYGASSLQDGVPSRFSGSGSGTDYTLTISSLQPEDFATYFC
QEGLKSPYTFGAGTKLEIK/RTVAAPSVFIFPPSDRKLKSGTASVVCLLNNFYPREAKVQWKVDNALQSGNSQESVTEQDSKDSTYS
LSSTLTLSKADYEKHKVYACEVTHQGLSSPVTKSFNRGEC
Chain 4-IL23-A[IL23]_H1_Ckappa Light Chain SEQ ID NO: 1294
QVQLVQSGAEVKKPGSSVKVSCKASGYTFTDQTIHWMRQAPGQGLEWIGYIYPRDDSPKYNENFKGKVTITADKSTSTAYMELSS
LRSEDTAVYYCAIPDRSGYAWFIYWGQGTLVTVSS/ASVAAPSVFIFPPSDEQLKSGTASVVCLLNNFYPREAKVQWKVDNALQSG
NSQESVTEQDSKDSTYSLSSTLTLSKADYEKHKVYACEVTHQGLSSPVTKSFNRGEC
XENP52516-041[TL1a]_H1_K213E/K218D_L1_D122K/E123K_Fab-IL23-A[IL23]_L1_CH1_H1_Ckappa_
crossMab_VH_VL-IgG1_pI(-)_Isosteric_A_PVA_/S267K/L368D/K370S/M428L/N434S-IgG1_PVA_/S267K/
S364K/E357Q/M428L/N434S
Chain 1-041[TL1a]_H1_K213E/K218D_IgG1_pI(-)_Isosteric_A_PVA_/S267K/L368D/K370S/M428L/
N434S SEQ ID NO: 1295
QVQLVQSGAEVKKPGASVKVSCKVSGFSVTSYNVHWVRQAPGQGLEWMGVMWSGGNTDYNSKFQGRVTMTRDTSTNTVYME
LSSLRSEDTAVYYCARAGRYYHDSNYYWDFPYWGQGTLVTVSS/ASTKGPSVFPLAPSSKSTSGGTAALGCLVKDYFPEPVTVSW
NSGALTSGVHTFPAVLQSSGLYSLSSVVTVPSSSLGTQTYICNVNHKPSDTKVDEKVEPDSCDKTHTCPPCPAPPVAGPSVFLFPPKP
KDTLMISRTPEVTCVVVDVKHEDPEVKFNWYVDGVEVHNAKTKPREEEYNSTYRVVSVLTVLHQDWLNGKEYKCKVSNKALPA
PIEKTISKAKGQPREPQVYTLPPSREEMTKNQVSLTCDVSGFYPSDIAVEWESDGQPENNYKTTPPVLDSDGSFFLYSKLTVDKSRW
EQGDVFSCSVLHEALHSHYTQKSLSLSPGK
Chain 2-IL23-A[IL23]_L1_CH1_IgG1_PVA_/S267K/S364K/E357Q/M428L/N434S SEQ ID NO: 1296
DIQMTQSPSSLSASVGDRVTITCKASRDVAIAVAWYQQKPGKVPKLLIYWASTRHTGVPSRFSGSGSRTDFTLTISSLQPEDVADYF
CHQYSSYPFTFGSGTKLEIKSS/ASTKGPSVFPLAPSSKSTSGGTAALGCLVKDYFPEPVTVSWNSGALTSGVHTFPAVLQSSGLYSL
SSVVTVPSSSLGTQTYICNVNHKPSNTKVDKKVEPKSCDKTHTCPPCPAPPVAGPSVFLFPPKPKDTLMISRTPEVTCVVVDVKHED
PEVKFNWYVDGVEVHNAKTKPREEQYNSTYRVVSVLTVLHQDWLNGKEYKCKVSNKALPAPIEKTISKAKGQPREPQVYTLPPS
REQMTKNQVKLTCLVKGFYPSDIAVEWESNGQPENNYKTTPPVLDSDGSFFLYSKLTVDKSRWQQGNVFSCSVLHEALHSHYTQ
KSLSLSPGK
Chain 3-041[TL1a]_L1_D122K/E123K Light Chain SEQ ID NO: 1297
DIQMTQSPSSVSASVGDRVTITCRASEDIYSGLAWYQQKPGKSPKLLIYGASSLQDGVPSRFSGSGSGTDYTLTISSLQPEDFATYFC
QEGLKSPYTFGAGTKLEIK/RTVAAPSVFIFPPSKKQLKSGTASVVCLLNNFYPREAKVQWKVDNALQSGNSQESVTEQDSKDSTY
SLSSTLTLSKADYEKHKVYACEVTHQGLSSPVTKSFNRGEC
Chain 4-IL23-A[IL23]_H1_Ckappa Light Chain SEQ ID NO: 1298
QVQLVQSGAEVKKPGSSVKVSCKASGYTFTDQTIHWMRQAPGQGLEWIGYIYPRDDSPKYNENFKGKVTITADKSTSTAYMELSS
LRSEDTAVYYCAIPDRSGYAWFIYWGQGTLVTVSS/ASVAAPSVFIFPPSDEQLKSGTASVVCLLNNFYPREAKVQWKVDNALQSG
NSQESVTEQDSKDSTYSLSSTLTLSKADYEKHKVYACEVTHQGLSSPVTKSFNRGEC
XENP52517-041[TL1a]_H1_Q39E/K213E/K218D_L1_Q38K/D122K/E123K_Fab-IL23-
A[IL23]_L1_Q38K_CH1_H1_Q39E_Ckappa_crossMab_VH_VL-IgG1_pI(-)_Isosteric_A_PVA_/S267K/
L368D/K370S/M428L/N434S-IgG1_PVA_/S267K/S364K/E357Q/M428L/N434S
Chain 1-041[TL1a]_H1_Q39E/K213E/K218D_IgG1_pI(-)_Isosteric_A_PVA_/S267K/L368D/K370S/M428L/
N434S SEQ ID NO: 1299
QVQLVQSGAEVKKPGASVKVSCKVSGFSVTSYNVHWVREAPGQGLEWMGVMWSGGNTDYNSKFQGRVTMTRDTSTNTVYME
LSSLRSEDTAVYYCARAGRYYHDSNYYWDFPYWGQGTLVTVSS/ASTKGPSVFPLAPSSKSTSGGTAALGCLVKDYFPEPVTVSW
NSGALTSGVHTFPAVLQSSGLYSLSSVVTVPSSSLGTQTYICNVNHKPSDTKVDEKVEPDSCDKTHTCPPCPAPPVAGPSVFLFPPKP
KDTLMISRTPEVTCVVVDVKHEDPEVKFNWYVDGVEVHNAKTKPREEEYNSTYRVVSVLTVLHQDWLNGKEYKCKVSNKALPA
PIEKTISKAKGQPREPQVYTLPPSREEMTKNQVSLTCDVSGFYPSDIAVEWESDGQPENNYKTTPPVLDSDGSFFLYSKLTVDKSRW
EQGDVFSCSVLHEALHSHYTQKSLSLSPGK
Chain 2-IL23-A[IL23]_L1_Q38K_CH1_IgG1_PVA_/S267K/S364K/E357Q/M428L/N434S SEQ ID NO: 1300
DIQMTQSPSSLSASVGDRVTITCKASRDVAIAVAWYQKKPGKVPKLLIYWASTRHTGVPSRFSGSGSRTDFTLTISSLQPEDVADYF
CHQYSSYPFTFGSGTKLEIKSS/ASTKGPSVFPLAPSSKSTSGGTAALGCLVKDYFPEPVTVSWNSGALTSGVHTFPAVLQSSGLYSL
SSVVTVPSSSLGTQTYICNVNHKPSNTKVDKKVEPKSCDKTHTCPPCPAPPVAGPSVFLFPPKPKDTLMISRTPEVTCVVVDVKHED
PEVKFNWYVDGVEVHNAKTKPREEQYNSTYRVVSVLTVLHQDWLNGKEYKCKVSNKALPAPIEKTISKAKGQPREPQVYTLPPS
REQMTKNQVKLTCLVKGFYPSDIAVEWESNGQPENNYKTTPPVLDSDGSFFLYSKLTVDKSRWQQGNVFSCSVLHEALHSHYTQ
KSLSLSPGK
Chain 3-041[TL1a]_L1_Q38K/D122K/E123K Light Chain SEQ ID NO: 1301
DIQMTQSPSSVSASVGDRVTITCRASEDIYSGLAWYQKKPGKSPKLLIYGASSLQDGVPSRFSGSGSGTDYTLTISSLQPEDFATYFC
QEGLKSPYTFGAGTKLEIK/RTVAAPSVFIFPPSKKQLKSGTASVVCLLNNFYPREAKVQWKVDNALQSGNSQESVTEQDSKDSTY
SLSSTLTLSKADYEKHKVYACEVTHQGLSSPVTKSFNRGEC
Chain 4-IL23-A[IL23]_H1_Q39E_Ckappa Light Chain SEQ ID NO: 1302
QVQLVQSGAEVKKPGSSVKVSCKASGYTFTDQTIHWMREAPGQGLEWIGYIYPRDDSPKYNENFKGKVTITADKSTSTAYMELSS
LRSEDTAVYYCAIPDRSGYAWFIYWGQGTLVTVSS/ASVAAPSVFIFPPSDEQLKSGTASVVCLLNNFYPREAKVQWKVDNALQSG
NSQESVTEQDSKDSTYSLSSTLTLSKADYEKHKVYACEVTHQGLSSPVTKSFNRGEC
XENP52564-IL23-A[IL23]_H1_K213E/K218D_L1_D122K/E123K_Fab-041[TL1a]_L1_CH1_H1_Ckappa_crossMab_
VH_VL-IgG1_pI(-)_Isosteric_A_PVA_/S267K/L368D/K370S/M428L/N434S-IgG1_PVA_/S267K/S364K/
E357Q/M428L/N434S
Chain 1-IL23-A[IL23]_H1_K213E/K218D_IgG1_pI(-)_Isosteric_A_PVA_/S267K/L368D/K370S/M428L/N434S
SEQ ID NO: 1303
QVQLVQSGAEVKKPGSSVKVSCKASGYTFTDQTIHWMRQAPGQGLEWIGYIYPRDDSPKYNENFKGKVTITADKSTSTAYMELSS
LRSEDTAVYYCAIPDRSGYAWFIYWGQGTLVTVSS/ASTKGPSVFPLAPSSKSTSGGTAALGCLVKDYFPEPVTVSWNSGALTSGV
HTFPAVLQSSGLYSLSSVVTVPSSSLGTQTYICNVNHKPSDTKVDEKVEPDSCDKTHTCPPCPAPPVAGPSVFLFPPKPKDTLMISRT
PEVTCVVVDVKHEDPEVKFNWYVDGVEVHNAKTKPREEEYNSTYRVVSVLTVLHQDWLNGKEYKCKVSNKALPAPIEKTISKA
KGQPREPQVYTLPPSREEMTKNQVSLTCDVSGFYPSDIAVEWESDGQPENNYKTTPPVLDSDGSFFLYSKLTVDKSRWEQGDVFSC
SVLHEALHSHYTQKSLSLSPGK
Chain 2-041[TL1a]_L1_CH1_IgG1_PVA_/S267K/S364K/E357Q/M428L/N434S SEQ ID NO: 1304
DIQMTQSPSSVSASVGDRVTITCRASEDIYSGLAWYQQKPGKSPKLLIYGASSLQDGVPSRFSGSGSGTDYTLTISSLQPEDFATYFC
QEGLKSPYTFGAGTKLEIKSS/ASTKGPSVFPLAPSSKSTSGGTAALGCLVKDYFPEPVTVSWNSGALTSGVHTFPAVLQSSGLYSLS
SVVTVPSSSLGTQTYICNVNHKPSNTKVDKKVEPKSCDKTHTCPPCPAPPVAGPSVFLFPPKPKDTLMISRTPEVTCVVVDVKHEDP
EVKFNWYVDGVEVHNAKTKPREEQYNSTYRVVSVLTVLHQDWLNGKEYKCKVSNKALPAPIEKTISKAKGQPREPQVYTLPPSR
EQMTKNQVKLTCLVKGFYPSDIAVEWESNGQPENNYKTTPPVLDSDGSFFLYSKLTVDKSRWQQGNVFSCSVLHEALHSHYTQK
SLSLSPGK
Chain 3-IL23-A[IL23]_L1_D122K/E123K Light Chain SEQ ID NO: 1305
DIQMTQSPSSLSASVGDRVTITCKASRDVAIAVAWYQQKPGKVPKLLIYWASTRHTGVPSRFSGSGSRTDFTLTISSLQPEDVADYF
CHQYSSYPFTFGSGTKLEIK/RTVAAPSVFIFPPSKKQLKSGTASVVCLLNNFYPREAKVQWKVDNALQSGNSQESVTEQDSKDSTY
SLSSTLTLSKADYEKHKVYACEVTHQGLSSPVTKSFNRGEC
Chain 4-041[TL1a]_H1_Ckappa Light Chain SEQ ID NO: 1306
QVQLVQSGAEVKKPGASVKVSCKVSGFSVTSYNVHWVRQAPGQGLEWMGVMWSGGNTDYNSKFQGRVTMTRDTSTNTVYME
LSSLRSEDTAVYYCARAGRYYHDSNYYWDFPYWGQGTLVTVSS/ASVAAPSVFIFPPSDEQLKSGTASVVCLLNNFYPREAKVQW
KVDNALQSGNSQESVTEQDSKDSTYSLSSTLTLSKADYEKHKVYACEVTHQGLSSPVTKSFNRGEC
XENP52565-041[TL1a]_L1_CH1_H1_Ckappa_crossMab_VH_VL-IL23-A[IL23]_H1_K213E/K218D_L1_
D122K/E123K_Fab-IgG1_pI(-)_Isosteric_A_PVA_/S267K/L368D/K370S/M428L/N434S-IgG1_PVA_/S267K/
S364K/E357Q/M428L/N434S
Chain 1-041[TL1a]_L1_CH1_IgG1_pI(-)_Isosteric_A_PVA_/S267K/L368D/K370S/M428L/N434S SEQ ID
NO: 1307
DIQMTQSPSSVSASVGDRVTITCRASEDIYSGLAWYQQKPGKSPKLLIYGASSLQDGVPSRFSGSGSGTDYTLTISSLQPEDFATYFC
QEGLKSPYTFGAGTKLEIKSS/ASTKGPSVFPLAPSSKSTSGGTAALGCLVKDYFPEPVTVSWNSGALTSGVHTFPAVLQSSGLYSLS
SVVTVPSSSLGTQTYICNVNHKPSDTKVDKKVEPKSCDKTHTCPPCPAPPVAGPSVFLFPPKPKDTLMISRTPEVTCVVVDVKHEDP
EVKFNWYVDGVEVHNAKTKPREEEYNSTYRVVSVLTVLHQDWLNGKEYKCKVSNKALPAPIEKTISKAKGQPREPQVYTLPPSR
EEMTKNQVSLTCDVSGFYPSDIAVEWESDGQPENNYKTTPPVLDSDGSFFLYSKLTVDKSRWEQGDVFSCSVLHEALHSHYTQKS
LSLSPGK
Chain 2-IL23-A[IL23]_H1_K213E/K218D_IgG1_PVA_/S267K/S364K/E357Q/M428L/N434S SEQ ID NO: 1308
QVQLVQSGAEVKKPGSSVKVSCKASGYTFTDQTIHWMRQAPGQGLEWIGYIYPRDDSPKYNENFKGKVTITADKSTSTAYMELSS
LRSEDTAVYYCAIPDRSGYAWFIYWGQGTLVTVSS/ASTKGPSVFPLAPSSKSTSGGTAALGCLVKDYFPEPVTVSWNSGALTSGV
HTFPAVLQSSGLYSLSSVVTVPSSSLGTQTYICNVNHKPSNTKVDEKVEPDSCDKTHTCPPCPAPPVAGPSVFLFPPKPKDTLMISRT
PEVTCVVVDVKHEDPEVKFNWYVDGVEVHNAKTKPREEQYNSTYRVVSVLTVLHQDWLNGKEYKCKVSNKALPAPIEKTISKA
KGQPREPQVYTLPPSREQMTKNQVKLTCLVKGFYPSDIAVEWESNGQPENNYKTTPPVLDSDGSFFLYSKLTVDKSRWQQGNVFS
CSVLHEALHSHYTQKSLSLSPGK
Chain 3-041[TL1a]_H1_Ckappa Light Chain SEQ ID NO: 1309
QVQLVQSGAEVKKPGASVKVSCKVSGFSVTSYNVHWVRQAPGQGLEWMGVMWSGGNTDYNSKFQGRVTMTRDTSTNTVYME
LSSLRSEDTAVYYCARAGRYYHDSNYYWDFPYWGQGTLVTVSS/ASVAAPSVFIFPPSDEQLKSGTASVVCLLNNFYPREAKVQW
KVDNALQSGNSQESVTEQDSKDSTYSLSSTLTLSKADYEKHKVYACEVTHQGLSSPVTKSFNRGEC
Chain 4-IL23-A[IL23]_L1_D122K/E123K Light Chain SEQ ID NO: 1310
DIQMTQSPSSLSASVGDRVTITCKASRDVAIAVAWYQQKPGKVPKLLIYWASTRHTGVPSRFSGSGSRTDFTLTISSLQPEDVADYF
CHQYSSYPFTFGSGTKLEIK/RTVAAPSVFIFPPSKKQLKSGTASVVCLLNNFYPREAKVQWKVDNALQSGNSQESVTEQDSKDSTY
SLSSTLTLSKADYEKHKVYACEVTHQGLSSPVTKSFNRGEC
XENP52566-041[TL1a]_L1_Q38K_CH1_H1_Q39E_Ckappa_crossMab_VH_VL-IL23-
A[IL23]_H1_Q39E/K213E/K218D_L1_Q38K/D122K/E123K_Fab-IgG1_pI(-)_
Isosteric_A_PVA_/S267K/L368D/K370S/M428L/N434S-IgG1_PVA_/S267K/S364K/E357Q/M428L/N434S
Chain 1-041[TL1a]_L1_Q38K_CH1_IgG1_pI(-)_Isosteric_A_PVA_/S267K/L368D/K370S/M428L/N434S SEQ
ID NO: 1311
DIQMTQSPSSVSASVGDRVTITCRASEDIYSGLAWYQKKPGKSPKLLIYGASSLQDGVPSRFSGSGSGTDYTLTISSLQPEDFATYFC
QEGLKSPYTFGAGTKLEIKSS/ASTKGPSVFPLAPSSKSTSGGTAALGCLVKDYFPEPVTVSWNSGALTSGVHTFPAVLQSSGLYSLS
SVVTVPSSSLGTQTYICNVNHKPSDTKVDKKVEPKSCDKTHTCPPCPAPPVAGPSVFLFPPKPKDTLMISRTPEVTCVVVDVKHEDP
EVKFNWYVDGVEVHNAKTKPREEEYNSTYRVVSVLTVLHQDWLNGKEYKCKVSNKALPAPIEKTISKAKGQPREPQVYTLPPSR
EEMTKNQVSLTCDVSGFYPSDIAVEWESDGQPENNYKTTPPVLDSDGSFFLYSKLTVDKSRWEQGDVFSCSVLHEALHSHYTQKS
LSLSPGK
Chain 2-IL23-A[IL23]_H1_Q39E/K213E/K218D_IgG1_PVA_/S267K/S364K/E357Q/M428L/N434S SEQ ID NO: 1312
QVQLVQSGAEVKKPGSSVKVSCKASGYTFTDQTIHWMREAPGQGLEWIGYIYPRDDSPKYNENFKGKVTITADKSTSTAYMELSS
LRSEDTAVYYCAIPDRSGYAWFIYWGQGTLVTVSS/ASTKGPSVFPLAPSSKSTSGGTAALGCLVKDYFPEPVTVSWNSGALTSGV
HTFPAVLQSSGLYSLSSVVTVPSSSLGTQTYICNVNHKPSNTKVDEKVEPDSCDKTHTCPPCPAPPVAGPSVFLFPPKPKDTLMISRT
PEVTCVVVDVKHEDPEVKFNWYVDGVEVHNAKTKPREEQYNSTYRVVSVLTVLHQDWLNGKEYKCKVSNKALPAPIEKTISKA
KGQPREPQVYTLPPSREQMTKNQVKLTCLVKGFYPSDIAVEWESNGQPENNYKTTPPVLDSDGSFFLYSKLTVDKSRWQQGNVFS
CSVLHEALHSHYTQKSLSLSPGK
Chain 3-041[TL1a]_H1_Q39E_Ckappa Light Chain SEQ ID NO: 1313
QVQLVQSGAEVKKPGASVKVSCKVSGFSVTSYNVHWVREAPGQGLEWMGVMWSGGNTDYNSKFQGRVTMTRDTSTNTVYME
LSSLRSEDTAVYYCARAGRYYHDSNYYWDFPYWGQGTLVTVSS/ASVAAPSVFIFPPSDEQLKSGTASVVCLLNNFYPREAKVQW
KVDNALQSGNSQESVTEQDSKDSTYSLSSTLTLSKADYEKHKVYACEVTHQGLSSPVTKSFNRGEC
Chain 4-IL23-A[IL23]_L1_Q38K/D122K/E123K Light Chain SEQ ID NO: 1314
DIQMTQSPSSLSASVGDRVTITCKASRDVAIAVAWYQKKPGKVPKLLIYWASTRHTGVPSRFSGSGSRTDFTLTISSLQPEDVADYF
CHQYSSYPFTFGSGTKLEIK/RTVAAPSVFIFPPSKKQLKSGTASVVCLLNNFYPREAKVQWKVDNALQSGNSQESVTEQDSKDSTY
SLSSTLTLSKADYEKHKVYACEVTHQGLSSPVTKSFNRGEC
XENP53090-041[TL1a]_H1_K213E/K218D_L1_D122K/E123K_Fab-IL23-A[IL23]_L1_CH1_H1_
Ckappa_crossMab_VH_VL-IgG1_pI(-)_Isosteric_A_PV_/S267K/L368D/K370S-IgG1_PVA_/S267K/S364K/E357Q
Chain 1-041[TL1a]_H1_K213E/K218D_IgG1_pI(-)_Isosteric_A_PVA_/S267K/L368D/K370S SEQ ID NO: 1315
QVQLVQSGAEVKKPGASVKVSCKVSGFSVTSYNVHWVRQAPGQGLEWMGVMWSGGNTDYNSKFQGRVTMTRDTSTNTVYME
LSSLRSEDTAVYYCARAGRYYHDSNYYWDFPYWGQGTLVTVSS/ASTKGPSVFPLAPSSKSTSGGTAALGCLVKDYFPEPVTVSW
NSGALTSGVHTFPAVLQSSGLYSLSSVVTVPSSSLGTQTYICNVNHKPSDTKVDEKVEPDSCDKTHTCPPCPAPPVAGPSVFLFPPKP
KDTLMISRTPEVTCVVVDVKHEDPEVKFNWYVDGVEVHNAKTKPREEEYNSTYRVVSVLTVLHQDWLNGKEYKCKVSNKALPA
PIEKTISKAKGQPREPQVYTLPPSREEMTKNQVSLTCDVSGFYPSDIAVEWESDGQPENNYKTTPPVLDSDGSFFLYSKLTVDKSRW
EQGDVFSCSVMHEALHNHYTQKSLSLSPGK
Chain 2-IL23-A[IL23]_L1_CH1_IgGI_PVA_/S267K/S364K/E357Q SEQ ID NO: 1316
DIQMTQSPSSLSASVGDRVTITCKASRDVAIAVAWYQQKPGKVPKLLIYWASTRHTGVPSRFSGSGSRTDFTLTISSLQPEDVADYF
CHQYSSYPFTFGSGTKLEIKSS/ASTKGPSVFPLAPSSKSTSGGTAALGCLVKDYFPEPVTVSWNSGALTSGVHTFPAVLQSSGLYSL
SSVVTVPSSSLGTQTYICNVNHKPSNTKVDKKVEPKSCDKTHTCPPCPAPPVAGPSVFLFPPKPKDTLMISRTPEVTCVVVDVKHED
PEVKFNWYVDGVEVHNAKTKPREEQYNSTYRVVSVLTVLHQDWLNGKEYKCKVSNKALPAPIEKTISKAKGQPREPQVYTLPPS
REQMTKNQVKLTCLVKGFYPSDIAVEWESNGQPENNYKTTPPVLDSDGSFFLYSKLTVDKSRWQQGNVFSCSVMHEALHNHYTQ
KSLSLSPGK
Chain 3-041[TL1a]_L1_D122K/E123K Light Chain SEQ ID NO: 1317
DIQMTQSPSSVSASVGDRVTITCRASEDIYSGLAWYQQKPGKSPKLLIYGASSLQDGVPSRFSGSGSGTDYTLTISSLQPEDFATYFC
QEGLKSPYTFGAGTKLEIK/RTVAAPSVFIFPPSKKQLKSGTASVVCLLNNFYPREAKVQWKVDNALQSGNSQESVTEQDSKDSTY
SLSSTLTLSKADYEKHKVYACEVTHQGLSSPVTKSFNRGEC
Chain 4-IL23-A[IL23]_L1_CH1_H1_Ckappa Light Chain SEQ ID NO: 1318
QVQLVQSGAEVKKPGSSVKVSCKASGYTFTDQTIHWMRQAPGQGLEWIGYIYPRDDSPKYNENFKGKVTITADKSTSTAYMELSS
LRSEDTAVYYCAIPDRSGYAWFIYWGQGTLVTVSS/ASVAAPSVFIFPPSDEQLKSGTASVVCLLNNFYPREAKVQWKVDNALQSG
NSQESVTEQDSKDSTYSLSSTLTLSKADYEKHKVYACEVTHQGLSSPVTKSFNRGEC
XENP52877-041[TL1a]_H1_K147E/K213E_L1_E123R/Q124K_Fab-IL23-A[IL23]_L1_CH1_H1_Ckappa_crossMab_
VH_VL-IgG1_M428L/N434S-IgG1_M428L/N434S
Chain 1-041[TL1a]_H1_K147E/K213E_IgG1_M428L/N434S SEQ ID NO: 2312
QVQLVQSGAEVKKPGASVKVSCKVSGFSVTSYNVHWVRQAPGQGLEWMGVMWSGGNTDYNSKFQGRVTMTRDTSTNTVYME
LSSLRSEDTAVYYCARAGRYYHDSNYYWDFPYWGQGTLVTVSS/ASTKGPSVFPLAPSSKSTSGGTAALGCLVEDYFPEPVTVSW
NSGALTSGVHTFPAVLQSSGLYSLSSVVTVPSSSLGTQTYICNVNHKPSNTKVDEKVEPKSCDKTHTCPPCPAPEAAGGPSVFLFPP
KPKDTLMISRTPEVTCVVVDVSHEDPEVKFNWYVDGVEVHNAKTKPREEQYNSTYRVVSVLTVLHQDWLNGKEYKCKVSNKAL
GAPIEKTISKAKGQPREPQVCTLPPSRDELTKNQVSLSCAVKGFYPSDIAVEWESNGQPENNYKTTPPVLDSDGSFFLVSKLTVDKS
RWQQGNVFSCSVLHEALHSHYTQKSLSLSPGK
Chain 2-IL23-A[IL23]_L1_IgG1_M428L/N434S SEQ ID NO: 2313
DIQMTQSPSSLSASVGDRVTITCKASRDVAIAVAWYQQKPGKVPKLLIYWASTRHTGVPSRFSGSGSRTDFTLTISSLQPEDVADYF
CHQYSSYPFTFGSGTKLEIKSS/ASTKGPSVFPLAPSSKSTSGGTAALGCLVKDYFPEPVTVSWNSGALTSGVHTFPAVLQSSGLYSL
SSVVTVPSSSLGTQTYICNVNHKPSNTKVDKKVEPKSCDKTHTCPPCPAPEAAGGPSVFLFPPKPKDTLMISRTPEVTCVVVDVSHE
DPEVKFNWYVDGVEVHNAKTKPREEQYNSTYRVVSVLTVLHQDWLNGKEYKCKVSNKALGAPIEKTISKAKGQPREPQVYTLPP
CRDELTKNQVSLWCLVKGFYPSDIAVEWESNGQPENNYKTTPPVLDSDGSFFLYSKLTVDKSRWQQGNVFSCSVLHEALHSHYTQ
KSLSLSPGK
Chain 3-041[TL1a]_L1_E123R/Q124K Light Chain SEQ ID NO: 2314
DIQMTQSPSSVSASVGDRVTITCRASEDIYSGLAWYQQKPGKSPKLLIYGASSLQDGVPSRFSGSGSGTDYTLTISSLQPEDFATYFC
QEGLKSPYTFGAGTKLEIK/RTVAAPSVFIFPPSDRKLKSGTASVVCLLNNFYPREAKVQWKVDNALQSGNSQESVTEQDSKDSTYS
LSSTLTLSKADYEKHKVYACEVTHQGLSSPVTKSFNRGEC
Chain 4-IL23-A[IL23]_H1_Ckappa Light Chain SEQ ID NO: 2315
QVQLVQSGAEVKKPGSSVKVSCKASGYTFTDQTIHWMRQAPGQGLEWIGYIYPRDDSPKYNENFKGKVTITADKSTSTAYMELSS
LRSEDTAVYYCAIPDRSGYAWFIYWGQGTLVTVSS/ASVAAPSVFIFPPSDEQLKSGTASVVCLLNNFYPREAKVQWKVDNALQSG
NSQESVTEQDSKDSTYSLSSTLTLSKADYEKHKVYACEVTHQGLSSPVTKSFNRGEC
XENP53091-041[TL1a]_H1_K213E/K218D_L1_D122K/E123K_Fab-IL23-A[IL23]_L1_CH1_H1_Ckappa_crossMab_
VH_VL-IgG1_pI(-)_Isosteric_A_PVA_/M252Y/S254T/T256E/S267K/L368D/K370S-
IgG1_PVA_/M252Y/S254T/T256E/S267K/S364K/E357Q
Chain 1-041[TL1a]_H1_K213E/K218D_IgG1_pI(-)_Isosteric_A_PVA_/M252Y/S254T/T256E/S267K/L368D/K370S
SEQ ID NO: 1319
QVQLVQSGAEVKKPGASVKVSCKVSGFSVTSYNVHWVRQAPGQGLEWMGVMWSGGNTDYNSKFQGRVTMTRDTSTNTVYME
LSSLRSEDTAVYYCARAGRYYHDSNYYWDFPYWGQGTLVTVSS/ASTKGPSVFPLAPSSKSTSGGTAALGCLVKDYFPEPVTVSW
NSGALTSGVHTFPAVLQSSGLYSLSSVVTVPSSSLGTQTYICNVNHKPSDTKVDEKVEPDSCDKTHTCPPCPAPPVAGPSVFLFPPKP
KDTLYITREPEVTCVVVDVKHEDPEVKFNWYVDGVEVHNAKTKPREEEYNSTYRVVSVLTVLHQDWLNGKEYKCKVSNKALPA
PIEKTISKAKGQPREPQVYTLPPSREEMTKNQVSLTCDVSGFYPSDIAVEWESDGQPENNYKTTPPVLDSDGSFFLYSKLTVDKSRW
EQGDVFSCSVMHEALHNHYTQKSLSLSPGK
Chain 2-IL23-A[IL23]_L1_CH1_IgGI_PVA_/M252Y/S254T/T256E/S267K/S364K/E357Q SEQ ID NO: 1320
DIQMTQSPSSLSASVGDRVTITCKASRDVAIAVAWYQQKPGKVPKLLIYWASTRHTGVPSRFSGSGSRTDFTLTISSLQPEDVADYF
CHQYSSYPFTFGSGTKLEIKSS/ASTKGPSVFPLAPSSKSTSGGTAALGCLVKDYFPEPVTVSWNSGALTSGVHTFPAVLQSSGLYSL
SSVVTVPSSSLGTQTYICNVNHKPSNTKVDKKVEPKSCDKTHTCPPCPAPPVAGPSVFLFPPKPKDTLYITREPEVTCVVVDVKHED
PEVKFNWYVDGVEVHNAKTKPREEQYNSTYRVVSVLTVLHQDWLNGKEYKCKVSNKALPAPIEKTISKAKGQPREPQVYTLPPS
REQMTKNQVKLTCLVKGFYPSDIAVEWESNGQPENNYKTTPPVLDSDGSFFLYSKLTVDKSRWQQGNVFSCSVMHEALHNHYTQ
KSLSLSPGK
Chain 3-041[TL1a]_L1_D122K/E123K Light Chain SEQ ID NO: 1321
DIQMTQSPSSVSASVGDRVTITCRASEDIYSGLAWYQQKPGKSPKLLIYGASSLQDGVPSRFSGSGSGTDYTLTISSLQPEDFATYFC
QEGLKSPYTFGAGTKLEIK/RTVAAPSVFIFPPSKKQLKSGTASVVCLLNNFYPREAKVQWKVDNALQSGNSQESVTEQDSKDSTY
SLSSTLTLSKADYEKHKVYACEVTHQGLSSPVTKSFNRGEC
Chain 4-IL23-A[IL23]_L1_CH1_H1_Ckappa Light Chain SEQ ID NO: 1322
QVQLVQSGAEVKKPGSSVKVSCKASGYTFTDQTIHWMRQAPGQGLEWIGYIYPRDDSPKYNENFKGKVTITADKSTSTAYMELSS
LRSEDTAVYYCAIPDRSGYAWFIYWGQGTLVTVSS/ASVAAPSVFIFPPSDEQLKSGTASVVCLLNNFYPREAKVQWKVDNALQSG
NSQESVTEQDSKDSTYSLSSTLTLSKADYEKHKVYACEVTHQGLSSPVTKSFNRGEC
XENP53381-041[TL1a]_L1.27_CH1_H1.324_Ckappa_crossMab_VH_VL-IL23-
A[IL23]_H1_K213E/K218D_L1.117_D122K/E123K_Fab-IgG1_pI(-)_Isosteric_A_PVA_/S267K/
L368D/K370S/M428L/N434S-IgG1_PVA_/S267K/S364K/E357Q/M428L/N434S
Chain 1-041[TL1a]_L1.27_CH1_IgG1_pI(-)_Isosteric_A_PVA_/S267K/L368D/K370S/M428L/N434S SEQ ID
NO: 1323
DIQMTQSPSSVSASVGDRVTITCRASEDIYSGLAWYQQKPGKSPKLLIYGASSLQDGVPSRFSGSGSGTDYTLTISSLQPEDFATYFC
QEGLKSPYTFGQGTKLEIKSS/ASTKGPSVFPLAPSSKSTSGGTAALGCLVKDYFPEPVTVSWNSGALTSGVHTFPAVLQSSGLYSLS
SVVTVPSSSLGTQTYICNVNHKPSDTKVDKKVEPKSCDKTHTCPPCPAPPVAGPSVFLFPPKPKDTLMISRTPEVTCVVVDVKHEDP
EVKFNWYVDGVEVHNAKTKPREEEYNSTYRVVSVLTVLHQDWLNGKEYKCKVSNKALPAPIEKTISKAKGQPREPQVYTLPPSR
EEMTKNQVSLTCDVSGFYPSDIAVEWESDGQPENNYKTTPPVLDSDGSFFLYSKLTVDKSRWEQGDVFSCSVLHEALHSHYTQKS
LSLSPGK
Chain 2-IL23-A[IL23]_H1_K213E/K218D_IgG1_PVA_/S267K/S364K/E357Q/M428L/N434S SEQ ID NO: 1324
QVQLVQSGAEVKKPGSSVKVSCKASGYTFTDQTIHWMRQAPGQGLEWIGYIYPRDDSPKYNENFKGKVTITADKSTSTAYMELSS
LRSEDTAVYYCAIPDRSGYAWFIYWGQGTLVTVSS/ASTKGPSVFPLAPSSKSTSGGTAALGCLVKDYFPEPVTVSWNSGALTSGV
HTFPAVLQSSGLYSLSSVVTVPSSSLGTQTYICNVNHKPSNTKVDEKVEPDSCDKTHTCPPCPAPPVAGPSVFLFPPKPKDTLMISRT
PEVTCVVVDVKHEDPEVKFNWYVDGVEVHNAKTKPREEQYNSTYRVVSVLTVLHQDWLNGKEYKCKVSNKALPAPIEKTISKA
KGQPREPQVYTLPPSREQMTKNQVKLTCLVKGFYPSDIAVEWESNGQPENNYKTTPPVLDSDGSFFLYSKLTVDKSRWQQGNVFS
CSVLHEALHSHYTQKSLSLSPGK
Chain 3-041[TL1a]_H1.324_Ckappa Light Chain SEQ ID NO: 1325
QVQLVQSGAEVKKPGASVKVSCKVSGFPVTSYNVHWVRQAPGQGLEWMGVMWYGGNTDYNSKFQGRVTMTRDTSTNTVYME
LSSLRSEDTAVYYCARAGRYYHDSNYYWDFPYWGQGTLVTVSS/ASVAAPSVFIFPPSDEQLKSGTASVVCLLNNFYPREAKVQW
KVDNALQSGNSQESVTEQDSKDSTYSLSSTLTLSKADYEKHKVYACEVTHQGLSSPVTKSFNRGEC
Chain 4-IL23-A[IL23]_L1.117_D122K/E123K Light Chain SEQ ID NO: 1326
DIQMTQSPSSLSASVGDRVTITCKASRDVAIAVAWYQQKPGKVPKLLIYWASVRHTGVPSRFSGSGSRTDFTLTISSLQPEDVADYF
CYQYSSYPFTFGSGTKLEIK/RTVAAPSVFIFPPSKKQLKSGTASVVCLLNNFYPREAKVQWKVDNALQSGNSQESVTEQDSKDSTY
SLSSTLTLSKADYEKHKVYACEVTHQGLSSPVTKSFNRGEC
XENP53382-041[TL1a]_L1.27_CH1_H1.324_Ckappa_crossMab_VH_VL-IL23-
A[IL23]_H1.187_K213E/K218D_L1.116_D122K/E123K_Fab-IgG1_pI(-)_Isosteric_A_PVA_/S267K/
L368D/K370S/M428L/N434S-IgG1_PVA_/S267K/S364K/E357Q/M428L/N434S
Chain 1-041[TL1a]_L1.27_CH1_IgG1_pl(-)_Isosteric_A_PVA_/S267K/L368D/K370S/M428L/N434S SEQ ID
NO: 1327
DIQMTQSPSSVSASVGDRVTITCRASEDIYSGLAWYQQKPGKSPKLLIYGASSLQDGVPSRFSGSGSGTDYTLTISSLQPEDFATYFC
QEGLKSPYTFGQGTKLEIKSS/ASTKGPSVFPLAPSSKSTSGGTAALGCLVKDYFPEPVTVSWNSGALTSGVHTFPAVLQSSGLYSLS
SVVTVPSSSLGTQTYICNVNHKPSDTKVDKKVEPKSCDKTHTCPPCPAPPVAGPSVFLFPPKPKDTLMISRTPEVTCVVVDVKHEDP
EVKFNWYVDGVEVHNAKTKPREEEYNSTYRVVSVLTVLHQDWLNGKEYKCKVSNKALPAPIEKTISKAKGQPREPQVYTLPPSR
EEMTKNQVSLTCDVSGFYPSDIAVEWESDGQPENNYKTTPPVLDSDGSFFLYSKLTVDKSRWEQGDVFSCSVLHEALHSHYTQKS
LSLSPGK
Chain 2-IL23-A[IL23]_H1.187_K213E/K218D_IgG1_PVA_/S267K/S364K/E357Q/M428L/N434S SEQ ID NO: 1328
QVQLVQSGAEVKKPGSSVKVSCKASGYTFTDQTIHWMRQAPGQGLEWIGYIYPRDDSPKYNENFKGKVTITADKSTSTAYMELSS
LRSEDTAVYYCAIPDRSGYAFFIYWGQGTLVTVSS/ASTKGPSVFPLAPSSKSTSGGTAALGCLVKDYFPEPVTVSWNSGALTSGVH
TFPAVLQSSGLYSLSSVVTVPSSSLGTQTYICNVNHKPSNTKVDEKVEPDSCDKTHTCPPCPAPPVAGPSVFLFPPKPKDTLMISRTP
EVTCVVVDVKHEDPEVKFNWYVDGVEVHNAKTKPREEQYNSTYRVVSVLTVLHQDWLNGKEYKCKVSNKALPAPIEKTISKAK
GQPREPQVYTLPPSREQMTKNQVKLTCLVKGFYPSDIAVEWESNGQPENNYKTTPPVLDSDGSFFLYSKLTVDKSRWQQGNVFSC
SVLHEALHSHYTQKSLSLSPGK
Chain 3-041[TL1a]_H1.324_Ckappa Light Chain SEQ ID NO: 1329
QVQLVQSGAEVKKPGASVKVSCKVSGFPVTSYNVHWVRQAPGQGLEWMGVMWYGGNTDYNSKFQGRVTMTRDTSTNTVYME
LSSLRSEDTAVYYCARAGRYYHDSNYYWDFPYWGQGTLVTVSS/ASVAAPSVFIFPPSDEQLKSGTASVVCLLNNFYPREAKVQW
KVDNALQSGNSQESVTEQDSKDSTYSLSSTLTLSKADYEKHKVYACEVTHQGLSSPVTKSFNRGEC
Chain 4-IL23-A[IL23]_L1.116_D122K/E123K Light Chain SEQ ID NO: 1330
DIQMTQSPSSLSASVGDRVTITCKASRDVAIAVAWYQQKPGKVPKLLIYWASQRHTGVPSRFSGSGSRTDFTLTISSLQPEDVADYF
CYQYSSYPFTFGSGTKLEIK/RTVAAPSVFIFPPSKKQLKSGTASVVCLLNNFYPREAKVQWKVDNALQSGNSQESVTEQDSKDSTY
SLSSTLTLSKADYEKHKVYACEVTHQGLSSPVTKSFNRGEC
XENP53383-041[TL1a]_L1.27_CH1_H1.324_Ckappa_crossMab_VH_VL-IL23-
A[IL23]_H1.41_K213E/K218D_L1.117_D122K/E123K_Fab-IgG1_pI(-)_Isosteric_A_PVA_/S267K/
L368D/K370S/M428L/N434S-IgG1_PVA_/S267K/S364K/E357Q/M428L/N434S
Chain 1-041[TL1a]_L1.27_CH1_IgGI_pI(-)_Isosteric_A_PVA_/S267K/L368D/K370S/M428L/N434S SEQ ID
NO: 1331
DIQMTQSPSSVSASVGDRVTITCRASEDIYSGLAWYQQKPGKSPKLLIYGASSLQDGVPSRFSGSGSGTDYTLTISSLQPEDFATYFC
QEGLKSPYTFGQGTKLEIKSS/ASTKGPSVFPLAPSSKSTSGGTAALGCLVKDYFPEPVTVSWNSGALTSGVHTFPAVLQSSGLYSLS
SVVTVPSSSLGTQTYICNVNHKPSDTKVDKKVEPKSCDKTHTCPPCPAPPVAGPSVFLFPPKPKDTLMISRTPEVTCVVVDVKHEDP
EVKFNWYVDGVEVHNAKTKPREEEYNSTYRVVSVLTVLHQDWLNGKEYKCKVSNKALPAPIEKTISKAKGQPREPQVYTLPPSR
EEMTKNQVSLTCDVSGFYPSDIAVEWESDGQPENNYKTTPPVLDSDGSFFLYSKLTVDKSRWEQGDVFSCSVLHEALHSHYTQKS
LSLSPGK
Chain 2-IL23-A[IL23]_H1.41_K213E/K218D_IgG1_PVA_/S267K/S364K/E357Q/M428L/N434S SEQ ID NO: 1332
QVQLVQSGAEVKKPGSSVKVSCKASGYTFTDQTLHWMRQAPGQGLEWIGYIYPRDDSPKYNENFKGKVTITADKSTSTAYMELS
SLRSEDTAVYYCAIPDRSGYAWFIYWGQGTLVTVSS/ASTKGPSVFPLAPSSKSTSGGTAALGCLVKDYFPEPVTVSWNSGALTSG
VHTFPAVLQSSGLYSLSSVVTVPSSSLGTQTYICNVNHKPSNTKVDEKVEPDSCDKTHTCPPCPAPPVAGPSVFLFPPKPKDTLMISR
TPEVTCVVVDVKHEDPEVKFNWYVDGVEVHNAKTKPREEQYNSTYRVVSVLTVLHQDWLNGKEYKCKVSNKALPAPIEKTISK
AKGQPREPQVYTLPPSREQMTKNQVKLTCLVKGFYPSDIAVEWESNGQPENNYKTTPPVLDSDGSFFLYSKLTVDKSRWQQGNVF
SCSVLHEALHSHYTQKSLSLSPGK
Chain 3-041[TL1a]_H1.324_Ckappa Light Chain SEQ ID NO: 1333
QVQLVQSGAEVKKPGASVKVSCKVSGFPVTSYNVHWVRQAPGQGLEWMGVMWYGGNTDYNSKFQGRVTMTRDTSTNTVYME
LSSLRSEDTAVYYCARAGRYYHDSNYYWDFPYWGQGTLVTVSS/ASVAAPSVFIFPPSDEQLKSGTASVVCLLNNFYPREAKVQW
KVDNALQSGNSQESVTEQDSKDSTYSLSSTLTLSKADYEKHKVYACEVTHQGLSSPVTKSFNRGEC
Chain 4-IL23-A[IL23]_L1.117_D122K/E123K Light Chain SEQ ID NO: 1334
DIQMTQSPSSLSASVGDRVTITCKASRDVAIAVAWYQQKPGKVPKLLIYWASVRHTGVPSRFSGSGSRTDFTLTISSLQPEDVADYF
CYQYSSYPFTFGSGTKLEIK/RTVAAPSVFIFPPSKKQLKSGTASVVCLLNNFYPREAKVQWKVDNALQSGNSQESVTEQDSKDSTY
SLSSTLTLSKADYEKHKVYACEVTHQGLSSPVTKSFNRGEC
XENP53384-041[TL1a]_L1.27_CH1_H1.318_Ckappa_crossMab_VH_VL-IL23-
A[IL23]_H1_K213E/K218D_L1.117_D122K/E123K_Fab-IgG1_pI(-)_Isosteric_A_PVA_/S267K/
L368D/K370S/M428L/N434S-IgG1_PVA_/S267K/S364K/E357Q/M428L/N434S
Chain 1-041[TL1a]_L1.27_CH1_IgG1_pI(-)_Isosteric_A_PVA_/S267K/L368D/K370S/M428L/N434S SEQ ID
NO: 1335
DIQMTQSPSSVSASVGDRVTITCRASEDIYSGLAWYQQKPGKSPKLLIYGASSLQDGVPSRFSGSGSGTDYTLTISSLQPEDFATYFC
QEGLKSPYTFGQGTKLEIKSS/ASTKGPSVFPLAPSSKSTSGGTAALGCLVKDYFPEPVTVSWNSGALTSGVHTFPAVLQSSGLYSLS
SVVTVPSSSLGTQTYICNVNHKPSDTKVDKKVEPKSCDKTHTCPPCPAPPVAGPSVFLFPPKPKDTLMISRTPEVTCVVVDVKHEDP
EVKFNWYVDGVEVHNAKTKPREEEYNSTYRVVSVLTVLHQDWLNGKEYKCKVSNKALPAPIEKTISKAKGQPREPQVYTLPPSR
EEMTKNQVSLTCDVSGFYPSDIAVEWESDGQPENNYKTTPPVLDSDGSFFLYSKLTVDKSRWEQGDVFSCSVLHEALHSHYTQKS
LSLSPGK
Chain 2-IL23-A[IL23]_H1_K213E/K218D_IgG1_PVA_/S267K/S364K/E357Q/M428L/N434S SEQ ID NO: 1336
QVQLVQSGAEVKKPGSSVKVSCKASGYTFTDQTIHWMRQAPGQGLEWIGYIYPRDDSPKYNENFKGKVTITADKSTSTAYMELSS
LRSEDTAVYYCAIPDRSGYAWFIYWGQGTLVTVSS/ASTKGPSVFPLAPSSKSTSGGTAALGCLVKDYFPEPVTVSWNSGALTSGV
HTFPAVLQSSGLYSLSSVVTVPSSSLGTQTYICNVNHKPSNTKVDEKVEPDSCDKTHTCPPCPAPPVAGPSVFLFPPKPKDTLMISRT
PEVTCVVVDVKHEDPEVKFNWYVDGVEVHNAKTKPREEQYNSTYRVVSVLTVLHQDWLNGKEYKCKVSNKALPAPIEKTISKA
KGQPREPQVYTLPPSREQMTKNQVKLTCLVKGFYPSDIAVEWESNGQPENNYKTTPPVLDSDGSFFLYSKLTVDKSRWQQGNVFS
CSVLHEALHSHYTQKSLSLSPGK
Chain 3-041[TL1a]_H1.318_Ckappa Light Chain SEQ ID NO: 1337
QVQLVQSGAEVKKPGASVKVSCKVSGFSVTSYNVHWVRQAPGQGLEWMGVMWFGGNTDYNSKFQGRVTMTRDTSTNTVYME
LSSLRSEDTAVYYCARAGRYYHDSNYYWDFPYWGQGTLVTVSS/ASVAAPSVFIFPPSDEQLKSGTASVVCLLNNFYPREAKVQW
KVDNALQSGNSQESVTEQDSKDSTYSLSSTLTLSKADYEKHKVYACEVTHQGLSSPVTKSFNRGEC
Chain 4-IL23-A[IL23]_L1.117_D122K/E123K Light Chain SEQ ID NO: 1338
DIQMTQSPSSLSASVGDRVTITCKASRDVAIAVAWYQQKPGKVPKLLIYWASVRHTGVPSRFSGSGSRTDFTLTISSLQPEDVADYF
CYQYSSYPFTFGSGTKLEIK/RTVAAPSVFIFPPSKKQLKSGTASVVCLLNNFYPREAKVQWKVDNALQSGNSQESVTEQDSKDSTY
SLSSTLTLSKADYEKHKVYACEVTHQGLSSPVTKSFNRGEC
XENP53385-041[TL1a]_L1.27_CH1_H1.318_Ckappa_crossMab_VH_VL-IL23-
A[IL23]_H1.187_K213E/K218D_L1.116_D122K/E123K_Fab-IgG1_pI(-)_Isosteric_A_PVA_/S267K/
L368D/K370S/M428L/N434S-IgG1_PVA_/S267K/S364K/E357Q/M428L/N434S
Chain 1-041[TL1a]_L1.27_CH1_IgG1_pI(-)_Isosteric_A_PVA_/S267K/L368D/K370S/M428L/N434S SEQ ID
NO: 1339
DIQMTQSPSSVSASVGDRVTITCRASEDIYSGLAWYQQKPGKSPKLLIYGASSLQDGVPSRFSGSGSGTDYTLTISSLQPEDFATYFC
QEGLKSPYTFGQGTKLEIKSS/ASTKGPSVFPLAPSSKSTSGGTAALGCLVKDYFPEPVTVSWNSGALTSGVHTFPAVLQSSGLYSLS
SVVTVPSSSLGTQTYICNVNHKPSDTKVDKKVEPKSCDKTHTCPPCPAPPVAGPSVFLFPPKPKDTLMISRTPEVTCVVVDVKHEDP
EVKFNWYVDGVEVHNAKTKPREEEYNSTYRVVSVLTVLHQDWLNGKEYKCKVSNKALPAPIEKTISKAKGQPREPQVYTLPPSR
EEMTKNQVSLTCDVSGFYPSDIAVEWESDGQPENNYKTTPPVLDSDGSFFLYSKLTVDKSRWEQGDVFSCSVLHEALHSHYTQKS
LSLSPGK
Chain 2-IL23-A[IL23]_H1.187_K213E/K218D_IgG1_PVA_/S267K/S364K/E357Q/M428L/N434S SEQ ID NO: 1340
QVQLVQSGAEVKKPGSSVKVSCKASGYTFTDQTIHWMRQAPGQGLEWIGYIYPRDDSPKYNENFKGKVTITADKSTSTAYMELSS
LRSEDTAVYYCAIPDRSGYAFFIYWGQGTLVTVSS/ASTKGPSVFPLAPSSKSTSGGTAALGCLVKDYFPEPVTVSWNSGALTSGVH
TFPAVLQSSGLYSLSSVVTVPSSSLGTQTYICNVNHKPSNTKVDEKVEPDSCDKTHTCPPCPAPPVAGPSVFLFPPKPKDTLMISRTP
EVTCVVVDVKHEDPEVKFNWYVDGVEVHNAKTKPREEQYNSTYRVVSVLTVLHQDWLNGKEYKCKVSNKALPAPIEKTISKAK
GQPREPQVYTLPPSREQMTKNQVKLTCLVKGFYPSDIAVEWESNGQPENNYKTTPPVLDSDGSFFLYSKLTVDKSRWQQGNVFSC
SVLHEALHSHYTQKSLSLSPGK
Chain 3-041[TL1a]_H1.318_Ckappa Light Chain SEQ ID NO: 1341
QVQLVQSGAEVKKPGASVKVSCKVSGFSVTSYNVHWVRQAPGQGLEWMGVMWFGGNTDYNSKFQGRVTMTRDTSTNTVYME
LSSLRSEDTAVYYCARAGRYYHDSNYYWDFPYWGQGTLVTVSS/ASVAAPSVFIFPPSDEQLKSGTASVVCLLNNFYPREAKVQW
KVDNALQSGNSQESVTEQDSKDSTYSLSSTLTLSKADYEKHKVYACEVTHQGLSSPVTKSFNRGEC
Chain 4-IL23-A[IL23]_L1.116_D122K/E123K Light Chain SEQ ID NO: 1342
DIQMTQSPSSLSASVGDRVTITCKASRDVAIAVAWYQQKPGKVPKLLIYWASQRHTGVPSRFSGSGSRTDFTLTISSLQPEDVADYF
CYQYSSYPFTFGSGTKLEIK/RTVAAPSVFIFPPSKKQLKSGTASVVCLLNNFYPREAKVQWKVDNALQSGNSQESVTEQDSKDSTY
SLSSTLTLSKADYEKHKVYACEVTHQGLSSPVTKSFNRGEC
XENP53386-041[TL1a]_L1.27_CH1_H1.318_Ckappa_crossMab_VH_VL-IL23-
A[IL23]_H1.41_K213E/K218D_L1.117_D122K/E123K_Fab-IgG1_pI(-)_Isosteric_A_PVA_/S267K/
L368D/K370S/M428L/N434S-IgG1_PVA_/S267K/S364K/E357Q/M428L/N434S
Chain 1-041[TL1a]_L1.27_CH1_IgG1_pI(-)_Isosteric_A_PVA_/S267K/L368D/K370S/M428L/N434S SEQ ID
NO: 1343
DIQMTQSPSSVSASVGDRVTITCRASEDIYSGLAWYQQKPGKSPKLLIYGASSLQDGVPSRFSGSGSGTDYTLTISSLQPEDFATYFC
QEGLKSPYTFGQGTKLEIKSS/ASTKGPSVFPLAPSSKSTSGGTAALGCLVKDYFPEPVTVSWNSGALTSGVHTFPAVLQSSGLYSLS
SVVTVPSSSLGTQTYICNVNHKPSDTKVDKKVEPKSCDKTHTCPPCPAPPVAGPSVFLFPPKPKDTLMISRTPEVTCVVVDVKHEDP
EVKFNWYVDGVEVHNAKTKPREEEYNSTYRVVSVLTVLHQDWLNGKEYKCKVSNKALPAPIEKTISKAKGQPREPQVYTLPPSR
EEMTKNQVSLTCDVSGFYPSDIAVEWESDGQPENNYKTTPPVLDSDGSFFLYSKLTVDKSRWEQGDVFSCSVLHEALHSHYTQKS
LSLSPGK
Chain 2-IL23-A[IL23]_H1.41_K213E/K218D_IgG1_PVA_/S267K/S364K/E357Q/M428L/N434S SEQ ID NO: 1344
QVQLVQSGAEVKKPGSSVKVSCKASGYTFTDQTLHWMRQAPGQGLEWIGYIYPRDDSPKYNENFKGKVTITADKSTSTAYMELS
SLRSEDTAVYYCAIPDRSGYAWFIYWGQGTLVTVSS/ASTKGPSVFPLAPSSKSTSGGTAALGCLVKDYFPEPVTVSWNSGALTSG
VHTFPAVLQSSGLYSLSSVVTVPSSSLGTQTYICNVNHKPSNTKVDEKVEPDSCDKTHTCPPCPAPPVAGPSVFLFPPKPKDTLMISR
TPEVTCVVVDVKHEDPEVKFNWYVDGVEVHNAKTKPREEQYNSTYRVVSVLTVLHQDWLNGKEYKCKVSNKALPAPIEKTISK
AKGQPREPQVYTLPPSREQMTKNQVKLTCLVKGFYPSDIAVEWESNGQPENNYKTTPPVLDSDGSFFLYSKLTVDKSRWQQGNVF
SCSVLHEALHSHYTQKSLSLSPGK
Chain 3-041[TL1a]_H1.318_Ckappa Light Chain SEQ ID NO: 1345
QVQLVQSGAEVKKPGASVKVSCKVSGFSVTSYNVHWVRQAPGQGLEWMGVMWFGGNTDYNSKFQGRVTMTRDTSTNTVYME
LSSLRSEDTAVYYCARAGRYYHDSNYYWDFPYWGQGTLVTVSS/ASVAAPSVFIFPPSDEQLKSGTASVVCLLNNFYPREAKVQW
KVDNALQSGNSQESVTEQDSKDSTYSLSSTLTLSKADYEKHKVYACEVTHQGLSSPVTKSFNRGEC
Chain 4-IL23-A[IL23]_L1.117_D122K/E123K Light Chain SEQ ID NO: 1346
DIQMTQSPSSLSASVGDRVTITCKASRDVAIAVAWYQQKPGKVPKLLIYWASVRHTGVPSRFSGSGSRTDFTLTISSLQPEDVADYF
CYQYSSYPFTFGSGTKLEIK/RTVAAPSVFIFPPSKKQLKSGTASVVCLLNNFYPREAKVQWKVDNALQSGNSQESVTEQDSKDSTY
SLSSTLTLSKADYEKHKVYACEVTHQGLSSPVTKSFNRGEC
XENE53387-041[TL1a]_L1.27_CH1_H1.447_Ckapa_crossMab_VH_VL-IL23-
A[IL23]_H1_K213F/K218D_L1.117_D122K/E123K_Fab-IgG1_pI(-)_Isoteric_A_PVA_S267K/L368D/K370S/M428L/
N434S-IgG1_PVA_/S267K/S364K/E357Q/M428L/N434S
Chain 1-041[TL1a]_L1.27_CH1_IgG1_pI(-)_Isosteric_A_PVA_/S267K/L368D/K370S/M428L/N434S SEQ ID
NO: 1347
DIQMTQSPSSVSASVGDRVTITCRASEDIYSGLAWYQQKPGKSPKLLIYGASSLQDGVPSRFSGSGSGTDYTLTISSLQPEDFATYFC
QEGLKSPYTFGQGTKLEIKSS/ASTKGPSVFPLAPSSKSTSGGTAALGCLVKDYFPEPVTVSWNSGALTSGVHTFPAVLQSSGLYSLS
SVVTVPSSSLGTQTYICNVNHKPSDTKVDKKVEPKSCDKTHTCPPCPAPPVAGPSVFLFPPKPKDTLMISRTPEVTCVVVDVKHEDP
EVKFNWYVDGVEVHNAKTKPREEEYNSTYRVVSVLTVLHQDWLNGKEYKCKVSNKALPAPIEKTISKAKGQPREPQVYTLPPSR
EEMTKNQVSLTCDVSGFYPSDIAVEWESDGQPENNYKTTPPVLDSDGSFFLYSKLTVDKSRWEQGDVFSCSVLHEALHSHYTQKS
LSLSPGK
Chain 2-IL23-A[IL23]_H1_K213E/K218D_IgG1_PVA_/S267K/S364K/E357Q/M428L/N434S SEQ ID NO: 1348
QVQLVQSGAEVKKPGSSVKVSCKASGYTFTDQTIHWMRQAPGQGLEWIGYIYPRDDSPKYNENFKGKVTITADKSTSTAYMELSS
LRSEDTAVYYCAIPDRSGYAWFIYWGQGTLVTVSS/ASTKGPSVFPLAPSSKSTSGGTAALGCLVKDYFPEPVTVSWNSGALTSGV
HTFPAVLQSSGLYSLSSVVTVPSSSLGTQTYICNVNHKPSNTKVDEKVEPDSCDKTHTCPPCPAPPVAGPSVFLFPPKPKDTLMISRT
PEVTCVVVDVKHEDPEVKFNWYVDGVEVHNAKTKPREEQYNSTYRVVSVLTVLHQDWLNGKEYKCKVSNKALPAPIEKTISKA
KGQPREPQVYTLPPSREQMTKNQVKLTCLVKGFYPSDIAVEWESNGQPENNYKTTPPVLDSDGSFFLYSKLTVDKSRWQQGNVFS
CSVLHEALHSHYTQKSLSLSPGK
Chain 3-041[TL1a]_H1.447_Ckappa Light Chain SEQ ID NO: 1349
QVQLVQSGAEVKKPGASVKVSCKVSGFSVTRYNVHWVRQAPGQGLEWMGVMWSGANTDYNSKFQGRVTMTRDTSTNTVYME
LSSLRSEDTAVYYCARAGRYYVDSNYYWDFPYWGQGTLVTVSS/ASVAAPSVFIFPPSDEQLKSGTASVVCLLNNFYPREAKVQW
KVDNALQSGNSQESVTEQDSKDSTYSLSSTLTLSKADYEKHKVYACEVTHQGLSSPVTKSFNRGEC
Chain 4-IL23-A[IL23]_L1.117_D122K/E123K Light Chain SEQ ID NO: 1350
DIQMTQSPSSLSASVGDRVTITCKASRDVAIAVAWYQQKPGKVPKLLIYWASVRHTGVPSRFSGSGSRTDFTLTISSLQPEDVADYF
CYQYSSYPFTFGSGTKLEIK/RTVAAPSVFIFPPSKKQLKSGTASVVCLLNNFYPREAKVQWKVDNALQSGNSQESVTEQDSKDSTY
SLSSTLTLSKADYEKHKVYACEVTHQGLSSPVTKSFNRGEC
XENP53388-041[TL1a]_L1.27_CH1_H1.447_Ckappa_crossMab_VH_VL-IL23-
A[IL23]_H1.187_K213E/K218D_L1.116_D122K/E123K_Fab-IgG1_pI(-)_Isosteric_A_PVA_/S267K/
L368D/K370S/M428L/N434S-IgG1_PVA_/S267K/S364K/E357Q/M428L/N434S
Chain 1-041[TL1a]_L1.27_CH1_IgG1_pI(-)_Isosteric_A_PVA_/S267K/L368D/K370S/M428L/N434S SEQ ID
NO: 1351
DIQMTQSPSSVSASVGDRVTITCRASEDIYSGLAWYQQKPGKSPKLLIYGASSLQDGVPSRFSGSGSGTDYTLTISSLQPEDFATYFC
QEGLKSPYTFGQGTKLEIKSS/ASTKGPSVFPLAPSSKSTSGGTAALGCLVKDYFPEPVTVSWNSGALTSGVHTFPAVLQSSGLYSLS
SVVTVPSSSLGTQTYICNVNHKPSDTKVDKKVEPKSCDKTHTCPPCPAPPVAGPSVFLFPPKPKDTLMISRTPEVTCVVVDVKHEDP
EVKFNWYVDGVEVHNAKTKPREEEYNSTYRVVSVLTVLHQDWLNGKEYKCKVSNKALPAPIEKTISKAKGQPREPQVYTLPPSR
EEMTKNQVSLTCDVSGFYPSDIAVEWESDGQPENNYKTTPPVLDSDGSFFLYSKLTVDKSRWEQGDVFSCSVLHEALHSHYTQKS
LSLSPGK
Chain 2-IL23-A[IL23]_H1.187_K213E/K218D_IgG1_PVA_/S267K/S364K/E357Q/M428L/N434S SEQ ID NO: 1352
QVQLVQSGAEVKKPGSSVKVSCKASGYTFTDQTIHWMRQAPGQGLEWIGYIYPRDDSPKYNENFKGKVTITADKSTSTAYMELSS
LRSEDTAVYYCAIPDRSGYAFFIYWGQGTLVTVSS/ASTKGPSVFPLAPSSKSTSGGTAALGCLVKDYFPEPVTVSWNSGALTSGVH
TFPAVLQSSGLYSLSSVVTVPSSSLGTQTYICNVNHKPSNTKVDEKVEPDSCDKTHTCPPCPAPPVAGPSVFLFPPKPKDTLMISRTP
EVTCVVVDVKHEDPEVKFNWYVDGVEVHNAKTKPREEQYNSTYRVVSVLTVLHQDWLNGKEYKCKVSNKALPAPIEKTISKAK
GQPREPQVYTLPPSREQMTKNQVKLTCLVKGFYPSDIAVEWESNGQPENNYKTTPPVLDSDGSFFLYSKLTVDKSRWQQGNVFSC
SVLHEALHSHYTQKSLSLSPGK
Chain 3-041[TL1a]_H1.447_Ckappa Light Chain SEQ ID NO: 1353
QVQLVQSGAEVKKPGASVKVSCKVSGFSVTRYNVHWVRQAPGQGLEWMGVMWSGANTDYNSKFQGRVTMTRDTSTNTVYME
LSSLRSEDTAVYYCARAGRYYVDSNYYWDFPYWGQGTLVTVSS/ASVAAPSVFIFPPSDEQLKSGTASVVCLLNNFYPREAKVQW
KVDNALQSGNSQESVTEQDSKDSTYSLSSTLTLSKADYEKHKVYACEVTHQGLSSPVTKSFNRGEC
Chain 4-IL23-A[IL23]_L1.116_D122K/E123K Light Chain SEQ ID NO: 1354
DIQMTQSPSSLSASVGDRVTITCKASRDVAIAVAWYQQKPGKVPKLLIYWASQRHTGVPSRFSGSGSRTDFTLTISSLQPEDVADYF
CYQYSSYPFTFGSGTKLEIK/RTVAAPSVFIFPPSKKQLKSGTASVVCLLNNFYPREAKVQWKVDNALQSGNSQESVTEQDSKDSTY
SLSSTLTLSKADYEKHKVYACEVTHQGLSSPVTKSFNRGEC
XENP53389-041[TL1a]_L1.27_CH1_H1.447_Ckappa_crossMab_VH_VL-IL23-
A[IL23]_H1.41_K213E/K218D_L1.117_D122K/E123K_Fab-IgG1_pI(-)_Isosteric_A_PVA_/S267K/
L368D/K370S/M428L/N434S-IgG1_PVA_/S267K/S364K/E357Q/M428L/N434S
Chain 1-041[TL1a]_L1.27_CH1_IgG1_pI(-)_Isosteric_A_PVA_/S267K/L368D/K370S/M428L/N434S SEQ ID
NO: 1355
DIQMTQSPSSVSASVGDRVTITCRASEDIYSGLAWYQQKPGKSPKLLIYGASSLQDGVPSRFSGSGSGTDYTLTISSLQPEDFATYFC
QEGLKSPYTFGQGTKLEIKSS/ASTKGPSVFPLAPSSKSTSGGTAALGCLVKDYFPEPVTVSWNSGALTSGVHTFPAVLQSSGLYSLS
SVVTVPSSSLGTQTYICNVNHKPSDTKVDKKVEPKSCDKTHTCPPCPAPPVAGPSVFLFPPKPKDTLMISRTPEVTCVVVDVKHEDP
EVKFNWYVDGVEVHNAKTKPREEEYNSTYRVVSVLTVLHQDWLNGKEYKCKVSNKALPAPIEKTISKAKGQPREPQVYTLPPSR
EEMTKNQVSLTCDVSGFYPSDIAVEWESDGQPENNYKTTPPVLDSDGSFFLYSKLTVDKSRWEQGDVFSCSVLHEALHSHYTQKS
LSLSPGK
Chain 2-IL23-A[IL23]_H1.41_K213E/K218D_IgG1_PVA_/S267K/S364K/E357Q/M428L/N434S SEQ ID NO: 1356
QVQLVQSGAEVKKPGSSVKVSCKASGYTFTDQTLHWMRQAPGQGLEWIGYIYPRDDSPKYNENFKGKVTITADKSTSTAYMELS
SLRSEDTAVYYCAIPDRSGYAWFIYWGQGTLVTVSS/ASTKGPSVFPLAPSSKSTSGGTAALGCLVKDYFPEPVTVSWNSGALTSG
VHTFPAVLQSSGLYSLSSVVTVPSSSLGTQTYICNVNHKPSNTKVDEKVEPDSCDKTHTCPPCPAPPVAGPSVFLFPPKPKDTLMISR
TPEVTCVVVDVKHEDPEVKFNWYVDGVEVHNAKTKPREEQYNSTYRVVSVLTVLHQDWLNGKEYKCKVSNKALPAPIEKTISK
AKGQPREPQVYTLPPSREQMTKNQVKLTCLVKGFYPSDIAVEWESNGQPENNYKTTPPVLDSDGSFFLYSKLTVDKSRWQQGNVF
SCSVLHEALHSHYTQKSLSLSPGK
Chain 3-041[TL1a]_H1.447_Ckappa Light Chain SEQ ID NO: 1357
QVQLVQSGAEVKKPGASVKVSCKVSGFSVTRYNVHWVRQAPGQGLEWMGVMWSGANTDYNSKFQGRVTMTRDTSTNTVYME
LSSLRSEDTAVYYCARAGRYYVDSNYYWDFPYWGQGTLVTVSS/ASVAAPSVFIFPPSDEQLKSGTASVVCLLNNFYPREAKVQW
KVDNALQSGNSQESVTEQDSKDSTYSLSSTLTLSKADYEKHKVYACEVTHQGLSSPVTKSFNRGEC
Chain 4-IL23-A[IL23]_L1.117_D122K/E123K Light Chain SEQ ID NO: 1358
DIQMTQSPSSLSASVGDRVTITCKASRDVAIAVAWYQQKPGKVPKLLIYWASVRHTGVPSRFSGSGSRTDFTLTISSLQPEDVADYF
CYQYSSYPFTFGSGTKLEIK/RTVAAPSVFIFPPSKKQLKSGTASVVCLLNNFYPREAKVQWKVDNALQSGNSQESVTEQDSKDSTY
SLSSTLTLSKADYEKHKVYACEVTHQGLSSPVTKSFNRGEC
XENP53390-041[TL1a]_L1.27_CH1_H1.239_Ckappa_crossMab_VH_VL-IL23-
A[IL23]_H1_K213E/K218D_L1.117_D122K/E123K_Fab-IgG1_pI(-)_Isosteric_A_PVA_/S267K/
L368D/K370S/M428L/N434S-IgG1_PVA_/S267K/S364K/E357Q/M428L/N434S
Chain 1-041[TL1a]_L1.27_CH1_IgG1_pI(-)_Isosteric_A_PVA_/S267K/L368D/K370S/M428L/N434S SEQ ID
NO: 1359
DIQMTQSPSSVSASVGDRVTITCRASEDIYSGLAWYQQKPGKSPKLLIYGASSLQDGVPSRFSGSGSGTDYTLTISSLQPEDFATYFC
QEGLKSPYTFGQGTKLEIKSS/ASTKGPSVFPLAPSSKSTSGGTAALGCLVKDYFPEPVTVSWNSGALTSGVHTFPAVLQSSGLYSLS
SVVTVPSSSLGTQTYICNVNHKPSDTKVDKKVEPKSCDKTHTCPPCPAPPVAGPSVFLFPPKPKDTLMISRTPEVTCVVVDVKHEDP
EVKFNWYVDGVEVHNAKTKPREEEYNSTYRVVSVLTVLHQDWLNGKEYKCKVSNKALPAPIEKTISKAKGQPREPQVYTLPPSR
EEMTKNQVSLTCDVSGFYPSDIAVEWESDGQPENNYKTTPPVLDSDGSFFLYSKLTVDKSRWEQGDVFSCSVLHEALHSHYTQKS
LSLSPGK
Chain 2-IL23-A[IL23]_H1_K213E/K218D_IgG1_PVA_/S267K/S364K/E357Q/M428L/N434S SEQ ID NO: 1360
QVQLVQSGAEVKKPGSSVKVSCKASGYTFTDQTIHWMRQAPGQGLEWIGYIYPRDDSPKYNENFKGKVTITADKSTSTAYMELSS
LRSEDTAVYYCAIPDRSGYAWFIYWGQGTLVTVSS/ASTKGPSVFPLAPSSKSTSGGTAALGCLVKDYFPEPVTVSWNSGALTSGV
HTFPAVLQSSGLYSLSSVVTVPSSSLGTQTYICNVNHKPSNTKVDEKVEPDSCDKTHTCPPCPAPPVAGPSVFLFPPKPKDTLMISRT
PEVTCVVVDVKHEDPEVKFNWYVDGVEVHNAKTKPREEQYNSTYRVVSVLTVLHQDWLNGKEYKCKVSNKALPAPIEKTISKA
KGQPREPQVYTLPPSREQMTKNQVKLTCLVKGFYPSDIAVEWESNGQPENNYKTTPPVLDSDGSFFLYSKLTVDKSRWQQGNVFS
CSVLHEALHSHYTQKSLSLSPGK
Chain 3-041[TL1a]_H1.239_Ckappa Light Chain SEQ ID NO: 1361
QVQLVQSGAEVKKPGASVKVSCKVSGFSVTSYNVHWVRQAPGQGLEWMGVMWRGGNTDYNSKFQGRVTMTRDTSTNTVYME
LSSLRSEDTAVYYCARAGRYYHDSNYYWDFPYWGQGTLVTVSS/ASVAAPSVFIFPPSDEQLKSGTASVVCLLNNFYPREAKVQW
KVDNALQSGNSQESVTEQDSKDSTYSLSSTLTLSKADYEKHKVYACEVTHQGLSSPVTKSFNRGEC
Chain 4-IL23-A[IL23]_L1.117_D122K/E123K Light Chain SEQ ID NO: 1362
DIQMTQSPSSLSASVGDRVTITCKASRDVAIAVAWYQQKPGKVPKLLIYWASVRHTGVPSRFSGSGSRTDFTLTISSLQPEDVADYF
CYQYSSYPFTFGSGTKLEIK/RTVAAPSVFIFPPSKKQLKSGTASVVCLLNNFYPREAKVQWKVDNALQSGNSQESVTEQDSKDSTY
SLSSTLTLSKADYEKHKVYACEVTHQGLSSPVTKSFNRGEC
XENP53391-041[TL1a]_L1.27_CH1_H1.239_Ckappa_crossMab_VH_VL-IL23-
A[IL23]_H1.187_K213E/K218D_L1.116_D122K/E123K_Fab-IgG1_pI(-)_Isosteric_A_PVA_/S267K/
L368D/K370S/M428L/N434S-IgG1_PVA_/S267K/S364K/E357Q/M428L/N434S
Chain 1-041[TL1a]_L1.27_CH1_IgG1_pl(-)_Isosteric_A_PVA_/S267K/L368D/K370S/M428L/N434S SEQ ID
NO: 1363
DIQMTQSPSSVSASVGDRVTITCRASEDIYSGLAWYQQKPGKSPKLLIYGASSLQDGVPSRFSGSGSGTDYTLTISSLQPEDFATYFC
QEGLKSPYTFGQGTKLEIKSS/ASTKGPSVFPLAPSSKSTSGGTAALGCLVKDYFPEPVTVSWNSGALTSGVHTFPAVLQSSGLYSLS
SVVTVPSSSLGTQTYICNVNHKPSDTKVDKKVEPKSCDKTHTCPPCPAPPVAGPSVFLFPPKPKDTLMISRTPEVTCVVVDVKHEDP
EVKFNWYVDGVEVHNAKTKPREEEYNSTYRVVSVLTVLHQDWLNGKEYKCKVSNKALPAPIEKTISKAKGQPREPQVYTLPPSR
EEMTKNQVSLTCDVSGFYPSDIAVEWESDGQPENNYKTTPPVLDSDGSFFLYSKLTVDKSRWEQGDVFSCSVLHEALHSHYTQKS
LSLSPGK
Chain 2-IL23-A[IL23]_H1.187_K213E/K218D_IgG1_PVA_/S267K/S364K/E357Q/M428L/N434S SEQ ID NO: 1364
QVQLVQSGAEVKKPGSSVKVSCKASGYTFTDQTIHWMRQAPGQGLEWIGYIYPRDDSPKYNENFKGKVTITADKSTSTAYMELSS
LRSEDTAVYYCAIPDRSGYAFFIYWGQGTLVTVSS/ASTKGPSVFPLAPSSKSTSGGTAALGCLVKDYFPEPVTVSWNSGALTSGVH
TFPAVLQSSGLYSLSSVVTVPSSSLGTQTYICNVNHKPSNTKVDEKVEPDSCDKTHTCPPCPAPPVAGPSVFLFPPKPKDTLMISRTP
EVTCVVVDVKHEDPEVKFNWYVDGVEVHNAKTKPREEQYNSTYRVVSVLTVLHQDWLNGKEYKCKVSNKALPAPIEKTISKAK
GQPREPQVYTLPPSREQMTKNQVKLTCLVKGFYPSDIAVEWESNGQPENNYKTTPPVLDSDGSFFLYSKLTVDKSRWQQGNVFSC
SVLHEALHSHYTQKSLSLSPGK
Chain 3-041[TL1a]_H1.239_Ckappa Light Chain SEQ ID NO: 1365
QVQLVQSGAEVKKPGASVKVSCKVSGFSVTSYNVHWVRQAPGQGLEWMGVMWRGGNTDYNSKFQGRVTMTRDTSTNTVYME
LSSLRSEDTAVYYCARAGRYYHDSNYYWDFPYWGQGTLVTVSS/ASVAAPSVFIFPPSDEQLKSGTASVVCLLNNFYPREAKVQW
KVDNALQSGNSQESVTEQDSKDSTYSLSSTLTLSKADYEKHKVYACEVTHQGLSSPVTKSFNRGEC
Chain 4-IL23-A[IL23]_L1.116_D122K/E123K Light Chain SEQ ID NO: 1366
DIQMTQSPSSLSASVGDRVTITCKASRDVAIAVAWYQQKPGKVPKLLIYWASQRHTGVPSRFSGSGSRTDFTLTISSLQPEDVADYF
CYQYSSYPFTFGSGTKLEIK/RTVAAPSVFIFPPSKKQLKSGTASVVCLLNNFYPREAKVQWKVDNALQSGNSQESVTEQDSKDSTY
SLSSTLTLSKADYEKHKVYACEVTHQGLSSPVTKSFNRGEC
XENP53392-041[TL1a]_L1.27_CH1_H1.239_Ckappa_crossMab_VH_VL-IL23-
A[IL23]_H1.41_K213E/K218D_L1.117_D122K/E123K_Fab-IgG1_pI(-)_Isosteric_A_PVA_/S267K/
L368D/K370S/M428L/N434S-IgG1_PVA_/S267K/S364K/E357Q/M428L/N434S
Chain 1-041[TL1a]_L1.27_CH1_IgG1_pI(-)_Isosteric_A_PVA_/S267K/L368D/K370S/M428L/N434S SEQ ID
NO: 1367
DIQMTQSPSSVSASVGDRVTITCRASEDIYSGLAWYQQKPGKSPKLLIYGASSLQDGVPSRESGSGSGTDYTLTISSLQPEDFATYFC
QEGLKSPYTFGQGTKLEIKSS/ASTKGPSVFPLAPSSKSTSGGTAALGCLVKDYFPEPVTVSWNSGALTSGVHTFPAVLQSSGLYSLS
SVVTVPSSSLGTQTYICNVNHKPSDTKVDKKVEPKSCDKTHTCPPCPAPPVAGPSVFLFPPKPKDTLMISRTPEVTCVVVDVKHEDP
EVKFNWYVDGVEVHNAKTKPREEEYNSTYRVVSVLTVLHQDWLNGKEYKCKVSNKALPAPIEKTISKAKGQPREPQVYTLPPSR
EEMTKNQVSLTCDVSGFYPSDIAVEWESDGQPENNYKTTPPVLDSDGSFFLYSKLTVDKSRWEQGDVFSCSVLHEALHSHYTQKS
LSLSPGK
Chain 2-IL23-A[IL23]_H1.41_K213E/K218D_IgG1_PVA_/S267K/S364K/E357Q/M428L/N434S SEQ ID NO: 1368
QVQLVQSGAEVKKPGSSVKVSCKASGYTFTDQTLHWMRQAPGQGLEWIGYIYPRDDSPKYNENFKGKVTITADKSTSTAYMELS
SLRSEDTAVYYCAIPDRSGYAWFIYWGQGTLVTVSS/ASTKGPSVFPLAPSSKSTSGGTAALGCLVKDYFPEPVTVSWNSGALTSG
VHTFPAVLQSSGLYSLSSVVTVPSSSLGTQTYICNVNHKPSNTKVDEKVEPDSCDKTHTCPPCPAPPVAGPSVFLFPPKPKDTLMISR
TPEVTCVVVDVKHEDPEVKFNWYVDGVEVHNAKTKPREEQYNSTYRVVSVLTVLHQDWLNGKEYKCKVSNKALPAPIEKTISK
AKGQPREPQVYTLPPSREQMTKNQVKLTCLVKGFYPSDIAVEWESNGQPENNYKTTPPVLDSDGSFFLYSKLTVDKSRWQQGNVF
SCSVLHEALHSHYTQKSLSLSPGK
Chain 3-041[TL1a]_H1.239_Ckappa Light Chain SEQ ID NO: 1369
QVQLVQSGAEVKKPGASVKVSCKVSGFSVTSYNVHWVRQAPGQGLEWMGVMWRGGNTDYNSKFQGRVTMTRDTSTNTVYME
LSSLRSEDTAVYYCARAGRYYHDSNYYWDFPYWGQGTLVTVSS/ASVAAPSVFIFPPSDEQLKSGTASVVCLLNNFYPREAKVQW
KVDNALQSGNSQESVTEQDSKDSTYSLSSTLTLSKADYEKHKVYACEVTHQGLSSPVTKSFNRGEC
Chain 4-IL23-A[IL23]_L1.117_D122K/E123K Light Chain SEQ ID NO: 1370
DIQMTQSPSSLSASVGDRVTITCKASRDVAIAVAWYQQKPGKVPKLLIYWASVRHTGVPSRFSGSGSRTDFTLTISSLQPEDVADYF
CYQYSSYPFTFGSGTKLEIK/RTVAAPSVFIFPPSKKQLKSGTASVVCLLNNFYPREAKVQWKVDNALQSGNSQESVTEQDSKDSTY
SLSSTLTLSKADYEKHKVYACEVTHQGLSSPVTKSFNRGEC
XENP53415-041[TL1a]_L1.27_CH1_H1.337_Ckappa_crossMab-VH_VL-IL23-
A[IL23]_H1_K213E/K218D_L1.117_D122K/E123K_Fab-IgG1_pI(-)_Isosteric_A_PVA_/S267K/
L368D/K370S/M428L/N434S-IgG1_PVA_/S267K/S364K/E357Q/M428L/N434S
Chain 1-041[TL1a]_L1.27_CH1_IgG1_pI(-)_Isosteric_A_PVA_/S267K/L368D/K370S/M428L/N434S SEQ ID
NO: 1371
DIQMTQSPSSVSASVGDRVTITCRASEDIYSGLAWYQQKPGKSPKLLIYGASSLQDGVPSRFSGSGSGTDYTLTISSLQPEDFATYFC
QEGLKSPYTFGQGTKLEIKSS/ASTKGPSVFPLAPSSKSTSGGTAALGCLVKDYFPEPVTVSWNSGALTSGVHTFPAVLQSSGLYSLS
SVVTVPSSSLGTQTYICNVNHKPSDTKVDKKVEPKSCDKTHTCPPCPAPPVAGPSVFLFPPKPKDTLMISRTPEVTCVVVDVKHEDP
EVKFNWYVDGVEVHNAKTKPREEEYNSTYRVVSVLTVLHQDWLNGKEYKCKVSNKALPAPIEKTISKAKGQPREPQVYTLPPSR
EEMTKNQVSLTCDVSGFYPSDIAVEWESDGQPENNYKTTPPVLDSDGSFFLYSKLTVDKSRWEQGDVFSCSVLHEALHSHYTQKS
LSLSPGK
Chain 2-IL23-A[IL23]_H1_K213E/K218D_IgG1_PVA_/S267K/S364K/E357Q/M428L/N434S SEQ ID NO: 1372
QVQLVQSGAEVKKPGSSVKVSCKASGYTFTDQTIHWMRQAPGQGLEWIGYIYPRDDSPKYNENFKGKVTITADKSTSTAYMELSS
LRSEDTAVYYCAIPDRSGYAWFIYWGQGTLVTVSS/ASTKGPSVFPLAPSSKSTSGGTAALGCLVKDYFPEPVTVSWNSGALTSGV
HTFPAVLQSSGLYSLSSVVTVPSSSLGTQTYICNVNHKPSNTKVDEKVEPDSCDKTHTCPPCPAPPVAGPSVFLFPPKPKDTLMISRT
PEVTCVVVDVKHEDPEVKFNWYVDGVEVHNAKTKPREEQYNSTYRVVSVLTVLHQDWLNGKEYKCKVSNKALPAPIEKTISKA
KGQPREPQVYTLPPSREQMTKNQVKLTCLVKGFYPSDIAVEWESNGQPENNYKTTPPVLDSDGSFFLYSKLTVDKSRWQQGNVFS
CSVLHEALHSHYTQKSLSLSPGK
Chain 3-041[TL1a]_H1.337_Ckappa Light Chain SEQ ID NO: 1373
QVQLVQSGAEVKKPGASVKVSCKVSGFSVTSYNVHWVRQAPGQGLEWMGVMWYGGNTDYNSKFQGRVTMTRDTSTNTVYME
LSSLRSEDTAVYYCARAGRYYVDSNYYWDFPYWGQGTLVTVSS/ASVAAPSVFIFPPSDEQLKSGTASVVCLLNNFYPREAKVQW
KVDNALQSGNSQESVTEQDSKDSTYSLSSTLTLSKADYEKHKVYACEVTHQGLSSPVTKSFNRGEC
Chain 4-IL23-A[IL23]_L1.117_D122K/E123K Light Chain SEQ ID NO: 1374
DIQMTQSPSSLSASVGDRVTITCKASRDVAIAVAWYQQKPGKVPKLLIYWASVRHTGVPSRFSGSGSRTDFTLTISSLQPEDVADYF
CYQYSSYPFTFGSGTKLEIK/RTVAAPSVFIFPPSKKQLKSGTASVVCLLNNFYPREAKVQWKVDNALQSGNSQESVTEQDSKDSTY
SLSSTLTLSKADYEKHKVYACEVTHQGLSSPVTKSFNRGEC
XENP53416-041[TL1a]_L1.27_CH1_H1.337_Ckappa_crossMab_VH_VL-IL23-
A[IL23]_H1.187_K213E/K218D_L1.116_D122K/E123K_Fab-IgG1_pI(-)_Isosteric_A_PVA_/S267K/
L368D/K370S/M428L/N434S-IgG1_PVA_/S267K/S364K/E357Q/M428L/N434S
Chain 1-041[TL1a]_L1.27_CH1_IgG1_pI(-)_Isosteric_A_PVA_/S267K/L368D/K370S/M428L/N434S SEQ ID
NO: 1375
DIQMTQSPSSVSASVGDRVTITCRASEDIYSGLAWYQQKPGKSPKLLIYGASSLQDGVPSRFSGSGSGTDYTLTISSLQPEDFATYFC
QEGLKSPYTFGQGTKLEIKSS/ASTKGPSVFPLAPSSKSTSGGTAALGCLVKDYFPEPVTVSWNSGALTSGVHTFPAVLQSSGLYSLS
SVVTVPSSSLGTQTYICNVNHKPSDTKVDKKVEPKSCDKTHTCPPCPAPPVAGPSVFLFPPKPKDTLMISRTPEVTCVVVDVKHEDP
EVKFNWYVDGVEVHNAKTKPREEEYNSTYRVVSVLTVLHQDWLNGKEYKCKVSNKALPAPIEKTISKAKGQPREPQVYTLPPSR
EEMTKNQVSLTCDVSGFYPSDIAVEWESDGQPENNYKTTPPVLDSDGSFFLYSKLTVDKSRWEQGDVFSCSVLHEALHSHYTQKS
LSLSPGK
Chain 2-IL23-A[IL23]_H1.187_K213E/K218D_IgG1_PVA_/S267K/S364K/E357Q/M428L/N434S SEQ ID NO: 1376
QVQLVQSGAEVKKPGSSVKVSCKASGYTFTDQTIHWMRQAPGQGLEWIGYIYPRDDSPKYNENFKGKVTITADKSTSTAYMELSS
LRSEDTAVYYCAIPDRSGYAFFIYWGQGTLVTVSS/ASTKGPSVFPLAPSSKSTSGGTAALGCLVKDYFPEPVTVSWNSGALTSGVH
TFPAVLQSSGLYSLSSVVTVPSSSLGTQTYICNVNHKPSNTKVDEKVEPDSCDKTHTCPPCPAPPVAGPSVFLFPPKPKDTLMISRTP
EVTCVVVDVKHEDPEVKFNWYVDGVEVHNAKTKPREEQYNSTYRVVSVLTVLHQDWLNGKEYKCKVSNKALPAPIEKTISKAK
GQPREPQVYTLPPSREQMTKNQVKLTCLVKGFYPSDIAVEWESNGQPENNYKTTPPVLDSDGSFFLYSKLTVDKSRWQQGNVFSC
SVLHEALHSHYTQKSLSLSPGK
Chain 3-041[TL1a]_H1.337_Ckappa Light Chain SEQ ID NO: 1377
QVQLVQSGAEVKKPGASVKVSCKVSGFSVTSYNVHWVRQAPGQGLEWMGVMWYGGNTDYNSKFQGRVTMTRDTSTNTVYME
LSSLRSEDTAVYYCARAGRYYVDSNYYWDFPYWGQGTLVTVSS/ASVAAPSVFIFPPSDEQLKSGTASVVCLLNNFYPREAKVQW
KVDNALQSGNSQESVTEQDSKDSTYSLSSTLTLSKADYEKHKVYACEVTHQGLSSPVTKSFNRGEC
Chain 4-IL23-A[IL23]_L1.116_D122K/E123K Light Chain SEQ ID NO: 1378
DIQMTQSPSSLSASVGDRVTITCKASRDVAIAVAWYQQKPGKVPKLLIYWASQRHTGVPSRFSGSGSRTDFTLTISSLQPEDVADYF
CYQYSSYPFTFGSGTKLEIK/RTVAAPSVFIFPPSKKQLKSGTASVVCLLNNFYPREAKVQWKVDNALQSGNSQESVTEQDSKDSTY
SLSSTLTLSKADYEKHKVYACEVTHQGLSSPVTKSFNRGEC
XENP53417-041[TL1a]_L1.27_CH1_H1.337_Ckappa_crossMab_VH_VL-IL23-
A[IL23]_H1.41_K213E/K218D_L1.117_D122K/E123K_Fab-IgG1_pI(-)_Isosteric_A_PVA_/S267K/
L368D/K370S/M428L/N434S-IgG1_PVA_/S267K/S364K/E357Q/M428L/N434S
Chain 1-041[TL1a]_L1.27_CH1_IgG1_pI(-)_Isosteric_A_PVA_/S267K/L368D/K370S/M428L/N434S SEQ ID
NO: 1379
DIQMTQSPSSVSASVGDRVTITCRASEDIYSGLAWYQQKPGKSPKLLIYGASSLQDGVPSRFSGSGSGTDYTLTISSLQPEDFATYFC
QEGLKSPYTFGQGTKLEIKSS/ASTKGPSVFPLAPSSKSTSGGTAALGCLVKDYFPEPVTVSWNSGALTSGVHTFPAVLQSSGLYSLS
SVVTVPSSSLGTQTYICNVNHKPSDTKVDKKVEPKSCDKTHTCPPCPAPPVAGPSVFLFPPKPKDTLMISRTPEVTCVVVDVKHEDP
EVKFNWYVDGVEVHNAKTKPREEEYNSTYRVVSVLTVLHQDWLNGKEYKCKVSNKALPAPIEKTISKAKGQPREPQVYTLPPSR
EEMTKNQVSLTCDVSGFYPSDIAVEWESDGQPENNYKTTPPVLDSDGSFFLYSKLTVDKSRWEQGDVFSCSVLHEALHSHYTQKS
LSLSPGK
Chain 2-IL23-A[IL23]_H1.41_K213E/K218D_IgG1_PVA_/S267K/S364K/E357Q/M428L/N434S SEQ ID NO: 1380
QVQLVQSGAEVKKPGSSVKVSCKASGYTFTDQTLHWMRQAPGQGLEWIGYIYPRDDSPKYNENFKGKVTITADKSTSTAYMELS
SLRSEDTAVYYCAIPDRSGYAWFIYWGQGTLVTVSS/ASTKGPSVFPLAPSSKSTSGGTAALGCLVKDYFPEPVTVSWNSGALTSG
VHTFPAVLQSSGLYSLSSVVTVPSSSLGTQTYICNVNHKPSNTKVDEKVEPDSCDKTHTCPPCPAPPVAGPSVFLFPPKPKDTLMISR
TPEVTCVVVDVKHEDPEVKFNWYVDGVEVHNAKTKPREEQYNSTYRVVSVLTVLHQDWLNGKEYKCKVSNKALPAPIEKTISK
AKGQPREPQVYTLPPSREQMTKNQVKLTCLVKGFYPSDIAVEWESNGQPENNYKTTPPVLDSDGSFFLYSKLTVDKSRWQQGNVF
SCSVLHEALHSHYTQKSLSLSPGK
Chain 3-041[TL1a]_H1.337_Ckappa Light Chain SEQ ID NO: 1381
QVQLVQSGAEVKKPGASVKVSCKVSGFSVTSYNVHWVRQAPGQGLEWMGVMWYGGNTDYNSKFQGRVTMTRDTSTNTVYME
LSSLRSEDTAVYYCARAGRYYVDSNYYWDFPYWGQGTLVTVSS/ASVAAPSVFIFPPSDEQLKSGTASVVCLLNNFYPREAKVQW
KVDNALQSGNSQESVTEQDSKDSTYSLSSTLTLSKADYEKHKVYACEVTHQGLSSPVTKSFNRGEC
Chain 4-IL23-A[IL23]_L1.117_D122K/E123K Light Chain SEQ ID NO: 1382
DIQMTQSPSSLSASVGDRVTITCKASRDVAIAVAWYQQKPGKVPKLLIYWASVRHTGVPSRFSGSGSRTDFTLTISSLQPEDVADYF
CYQYSSYPFTFGSGTKLEIK/RTVAAPSVFIFPPSKKQLKSGTASVVCLLNNFYPREAKVQWKVDNALQSGNSQESVTEQDSKDSTY
SLSSTLTLSKADYEKHKVYACEVTHQGLSSPVTKSFNRGEC
XENP55905-70417_111[TL1a]_L1_CH1_H1_Ckappa_crossMab_VH_VL-IL23-
A[IL23]_H1_K213E/K218D_L1_D122K/E123K_Fab-IgG1_pI(-)_Isosteric_A_PVA_/S267K/
L368D/K370S/M428L/N434S-IgG1_PVA_/S267K/S364K/E357Q/M428L/N434S
Chain 1-70417_111[TL1a]_L1_CH1_IgG1_pI(-)_Isosteric_A_PVA_/S267K/L368D/K370S/M428L/N434S SEQ
ID NO: 1383
DIVMTQSPDSLAVSLGERATINCKASQDVSTAVVWYQQKPGQSPKLLIYWASTRHTGVPDRFTGSGSGTDYTLTISSLQAEDVAVY
HCQQHYSTPYTFGGGTKLEIKSS/ASTKGPSVFPLAPSSKSTSGGTAALGCLVKDYFPEPVTVSWNSGALTSGVHTFPAVLQSSGLY
SLSSVVTVPSSSLGTQTYICNVNHKPSDTKVDKKVEPKSCDKTHTCPPCPAPPVAGPSVFLFPPKPKDTLMISRTPEVTCVVVDVKH
EDPEVKFNWYVDGVEVHNAKTKPREEEYNSTYRVVSVLTVLHQDWLNGKEYKCKVSNKALPAPIEKTISKAKGQPREPQVYTLP
PSREEMTKNQVSLTCDVSGFYPSDIAVEWESDGQPENNYKTTPPVLDSDGSFFLYSKLTVDKSRWEQGDVFSCSVLHEALHSHYT
QKSLSLSPGK
Chain 2-IL23-A[IL23]_H1_K213E/K218D_IgG1_PVA_/S267K/S364K/E357Q/M428L/N434S SEQ ID NO: 1384
QVQLVQSGAEVKKPGSSVKVSCKASGYTFTDQTIHWMRQAPGQGLEWIGYIYPRDDSPKYNENFKGKVTITADKSTSTAYMELSS
LRSEDTAVYYCAIPDRSGYAWFIYWGQGTLVTVSS/ASTKGPSVFPLAPSSKSTSGGTAALGCLVKDYFPEPVTVSWNSGALTSGV
HTFPAVLQSSGLYSLSSVVTVPSSSLGTQTYICNVNHKPSNTKVDEKVEPDSCDKTHTCPPCPAPPVAGPSVFLFPPKPKDTLMISRT
PEVTCVVVDVKHEDPEVKFNWYVDGVEVHNAKTKPREEQYNSTYRVVSVLTVLHQDWLNGKEYKCKVSNKALPAPIEKTISKA
KGQPREPQVYTLPPSREQMTKNQVKLTCLVKGFYPSDIAVEWESNGQPENNYKTTPPVLDSDGSFFLYSKLTVDKSRWQQGNVFS
CSVLHEALHSHYTQKSLSLSPGK
Chain 3-70417_111[TL1a]_H1_Ckappa Light Chain SEQ ID NO: 1385
EVQLVESGGGLVQPGGSLRLSCAASGFTFSSFGMHWVRQAPGKGLEWVSYISSGSTTIYYADSVKGRFTISRDNAKNSLYLQMNS
LRAEDTAVYYCARAPLLRGAMDYWGQGTLVTVSS/ASVAAPSVFIFPPSDEQLKSGTASVVCLLNNFYPREAKVQWKVDNALQS
GNSQESVTEQDSKDSTYSLSSTLTLSKADYEKHKVYACEVTHQGLSSPVTKSFNRGEC
Chain 4-IL23-A[IL23]_L1_D122K/E123K Light Chain SEQ ID NO: 1386
DIQMTQSPSSLSASVGDRVTITCKASRDVAIAVAWYQQKPGKVPKLLIYWASTRHTGVPSRFSGSGSRTDFTLTISSLQPEDVADYF
CHQYSSYPFTFGSGTKLEIK/RTVAAPSVFIFPPSKKQLKSGTASVVCLLNNFYPREAKVQWKVDNALQSGNSQESVTEQDSKDSTY
SLSSTLTLSKADYEKHKVYACEVTHQGLSSPVTKSFNRGEC
XENP55906-70417_111[TL1a]_L1_CH1_H1_Ckappa_crossMab_VH_VL-IL23-
A[IL23]_H1_K213E/K218D_L1.117_D122K/E123K_Fab-IgG1_pI(-)_Isosteric_A_PVA_/S267K/
L368D/K370S/M428L/N434S-IgG1_PVA_/S267K/S364K/E357Q/M428L/N434S
Chain 1-70417_111[TL1a]_L1_CH1_IgG1_pI(-)_Isosteric_A_PVA_/S267K/L368D/K370S/M428L/N434S SEQ
ID NO: 1387
DIVMTQSPDSLAVSLGERATINCKASQDVSTAVVWYQQKPGQSPKLLIYWASTRHTGVPDRFTGSGSGTDYTLTISSLQAEDVAVY
HCQQHYSTPYTFGGGTKLEIKSS/ASTKGPSVFPLAPSSKSTSGGTAALGCLVKDYFPEPVTVSWNSGALTSGVHTFPAVLQSSGLY
SLSSVVTVPSSSLGTQTYICNVNHKPSDTKVDKKVEPKSCDKTHTCPPCPAPPVAGPSVFLFPPKPKDTLMISRTPEVTCVVVDVKH
EDPEVKFNWYVDGVEVHNAKTKPREEEYNSTYRVVSVLTVLHQDWLNGKEYKCKVSNKALPAPIEKTISKAKGQPREPQVYTLP
PSREEMTKNQVSLTCDVSGFYPSDIAVEWESDGQPENNYKTTPPVLDSDGSFFLYSKLTVDKSRWEQGDVFSCSVLHEALHSHYT
QKSLSLSPGK
Chain 2-IL23-A[IL23]_H1_K213E/K218D_IgG1_PVA_/S267K/S364K/E357Q/M428L/N434S SEQ ID NO: 1388
QVQLVQSGAEVKKPGSSVKVSCKASGYTFTDQTIHWMRQAPGQGLEWIGYIYPRDDSPKYNENFKGKVTITADKSTSTAYMELSS
LRSEDTAVYYCAIPDRSGYAWFIYWGQGTLVTVSS/ASTKGPSVFPLAPSSKSTSGGTAALGCLVKDYFPEPVTVSWNSGALTSGV
HTFPAVLQSSGLYSLSSVVTVPSSSLGTQTYICNVNHKPSNTKVDEKVEPDSCDKTHTCPPCPAPPVAGPSVFLFPPKPKDTLMISRT
PEVTCVVVDVKHEDPEVKFNWYVDGVEVHNAKTKPREEQYNSTYRVVSVLTVLHQDWLNGKEYKCKVSNKALPAPIEKTISKA
KGQPREPQVYTLPPSREQMTKNQVKLTCLVKGFYPSDIAVEWESNGQPENNYKTTPPVLDSDGSFFLYSKLTVDKSRWQQGNVFS
CSVLHEALHSHYTQKSLSLSPGK
Chain 3-70417_111[TL1a]_H1_Ckappa Light Chain SEQ ID NO: 1389
EVQLVESGGGLVQPGGSLRLSCAASGFTFSSFGMHWVRQAPGKGLEWVSYISSGSTTIYYADSVKGRFTISRDNAKNSLYLQMNS
LRAEDTAVYYCARAPLLRGAMDYWGQGTLVTVSS/ASVAAPSVFIFPPSDEQLKSGTASVVCLLNNFYPREAKVQWKVDNALQS
GNSQESVTEQDSKDSTYSLSSTLTLSKADYEKHKVYACEVTHQGLSSPVTKSFNRGEC
Chain 4-IL23-A[IL23]_L1.117_D122K/E123K Light Chain SEQ ID NO: 1390
DIQMTQSPSSLSASVGDRVTITCKASRDVAIAVAWYQQKPGKVPKLLIYWASVRHTGVPSRFSGSGSRTDFTLTISSLQPEDVADYF
CYQYSSYPFTFGSGTKLEIK/RTVAAPSVFIFPPSKKQLKSGTASVVCLLNNFYPREAKVQWKVDNALQSGNSQESVTEQDSKDSTY
SLSSTLTLSKADYEKHKVYACEVTHQGLSSPVTKSFNRGEC
XENP55907-70417_111[TL1a]_L1_CH1_H1_Ckappa_crossMab_VH_VL-IL23-
A[IL23]_H1.187_K213E/K218D_L1.116_D122K/E123K_Fab-IgG1_pI(-)_Isosteric_A-PVA_/S267K/
L368D/K370S/M428L/N434S-IgG1_PVA_/S267K/S364K/E357Q/M428L/N434S
Chain 1-70417_111[TL1a]_Ll_CH1_IgG1_pI(-)_Isosteric_A_PVA_/S267K/L368D/K370S/M428L/N434S SEQ
ID NO: 1391
DIVMTQSPDSLAVSLGERATINCKASQDVSTAVVWYQQKPGQSPKLLIYWASTRHTGVPDRFTGSGSGTDYTLTISSLQAEDVAVY
HCQQHYSTPYTFGGGTKLEIKSS/ASTKGPSVFPLAPSSKSTSGGTAALGCLVKDYFPEPVTVSWNSGALTSGVHTFPAVLQSSGLY
SLSSVVTVPSSSLGTQTYICNVNHKPSDTKVDKKVEPKSCDKTHTCPPCPAPPVAGPSVFLFPPKPKDTLMISRTPEVTCVVVDVKH
EDPEVKFNWYVDGVEVHNAKTKPREEEYNSTYRVVSVLTVLHQDWLNGKEYKCKVSNKALPAPIEKTISKAKGQPREPQVYTLP
PSREEMTKNQVSLTCDVSGFYPSDIAVEWESDGQPENNYKTTPPVLDSDGSFFLYSKLTVDKSRWEQGDVFSCSVLHEALHSHYT
QKSLSLSPGK
Chain 2-IL23-A[IL23]_H1.187_K213E/K218D_IgG1_PVA_/S267K/S364K/E357Q/M428L/N434S SEQ ID NO: 1392
QVQLVQSGAEVKKPGSSVKVSCKASGYTFTDQTIHWMRQAPGQGLEWIGYIYPRDDSPKYNENFKGKVTITADKSTSTAYMELSS
LRSEDTAVYYCAIPDRSGYAFFIYWGQGTLVTVSS/ASTKGPSVFPLAPSSKSTSGGTAALGCLVKDYFPEPVTVSWNSGALTSGVH
TFPAVLQSSGLYSLSSVVTVPSSSLGTQTYICNVNHKPSNTKVDEKVEPDSCDKTHTCPPCPAPPVAGPSVFLFPPKPKDTLMISRTP
EVTCVVVDVKHEDPEVKFNWYVDGVEVHNAKTKPREEQYNSTYRVVSVLTVLHQDWLNGKEYKCKVSNKALPAPIEKTISKAK
GQPREPQVYTLPPSREQMTKNQVKLTCLVKGFYPSDIAVEWESNGQPENNYKTTPPVLDSDGSFFLYSKLTVDKSRWQQGNVFSC
SVLHEALHSHYTQKSLSLSPGK
Chain 3-70417_111[TL1a]_H1_Ckappa Light Chain SEQ ID NO: 1393
EVQLVESGGGLVQPGGSLRLSCAASGFTFSSFGMHWVRQAPGKGLEWVSYISSGSTTIYYADSVKGRFTISRDNAKNSLYLQMNS
LRAEDTAVYYCARAPLLRGAMDYWGQGTLVTVSS/ASVAAPSVFIFPPSDEQLKSGTASVVCLLNNFYPREAKVQWKVDNALQS
GNSQESVTEQDSKDSTYSLSSTLTLSKADYEKHKVYACEVTHQGLSSPVTKSFNRGEC
Chain 4-IL23-A[IL23]_L1.116_D122K/E123K Light Chain SEQ ID NO: 1394
DIQMTQSPSSLSASVGDRVTITCKASRDVAIAVAWYQQKPGKVPKLLIYWASQRHTGVPSRFSGSGSRTDFTLTISSLQPEDVADYF
CYQYSSYPFTFGSGTKLEIK/RTVAAPSVFIFPPSKKQLKSGTASVVCLLNNFYPREAKVQWKVDNALQSGNSQESVTEQDSKDSTY
SLSSTLTLSKADYEKHKVYACEVTHQGLSSPVTKSFNRGEC

### 3D: Additional Bispecific Antibody Formats

### 3D(1): 1+1 Common Light Chain (CLC) Format

[0572] Another heterodimeric antibody format that finds particular use in subject anti-TL1A×anti-IL23 antibodies provided herein is the 1+1 Common Light Chain (CLC) format (depicted schematically in FIG. 1, Panel C) which comprises a first monomer comprising VH1-CH1-hinge-CH2-CH3, a second monomer comprising VH2-CH1-hinge-CH2-CH3, and a third monomer comprising VL-CL. The VL pairs with the VH1 to form a binding domain with a first antigen binding specificity; and the VL pairs with the VH2 to form a binding domain with a second antigen binding specificity. Sequences for illustrative TL1A×IL23 bsAbs in the 1+1 CLC format are depicted in Table 33. CDRs are underlined and slashes indicate the border(s) between the variable regions, linkers, Fc regions, and constant domains. It should be noted that the TL1A×IL23 bsAbs can utilize variable region, Fc region, and constant domain sequences that are 90, 95, 98 and 99% identical (as defined herein), and/or contain from 1, 2, 3, 4, 5, 6, 7, 8, 9 or 10 amino acid substitutions. In addition, each sequence outlined herein can include or exclude the M428L/N434S or any other half-life extension variants and/or any other ablation variant (as depicted in Table 1) in one or preferably both Fc domains Additionally, each sequence can utilize any other heterodimeric Fc variant as depicted in Tables 12-17.

TABLE 33

| | SEQ ID NO \| Antigen | | | | | |
|---|---|---|---|---|---|---|
| Xencor ID | Chain 1 | | Chain 2 | | Chain 3 | |
| XENP51035 | 1156 | IL23 | 1157 | TL1A | 1158 | IL23 |
| XENP51036 | 1159 | TL1A | 1160 | IL23 | 1161 | IL23 |

### 3D(2): 2+1 Fab₂-scFv-Fc

[0573] Another exemplary format utilizing Fab domains and scFv is the 2+1 Fab-scFv-Fc format (depicted schematically in FIG. 1, Panel B) which comprises a first monomer comprising a VH domain covalently attached to a single-chain Fv (“scFv”) with a first antigen binding specificity covalently attached to a first heterodimeric Fc domain i.e., VH-CH1-domain-linker-scFv-domain linker-CH2-CH3, a second monomer comprising a heavy chain i.e., VH-CH1-hinge-CH2-CH3, wherein the CH2-CH3 is a second heterodimeric Fc domain complementary to the first heterodimeric Fc domain, and a light chain (LC) transfected separately so that a Fab domain having a second antigen binding specificity is formed with the variable heavy domain.

[0574] The amino acid sequence for an illustrative TL1A×IL23 bsAb in the 2+2 Fab₂-scFv-Fc format is depicted in Table 34 as XENP50965. Table 34 depicts the sequences for illustrative TL1A×IL23 bsAbs in additional bispecific formats. CDRs are underlined and slashes indicate the border(s) between the variable regions, linkers, Fc regions, and constant domains. It should be noted that the TL1A×IL23 bsAbs can utilize variable region, Fc region, and constant domain sequences that are 90, 95, 98 and 99% identical (as defined herein), and/or contain from 1, 2, 3, 4, 5, 6, 7, 8, 9 or 10 amino acid substitutions. In addition, each sequence outlined herein can include or exclude the M428L/N434S or any other half-life extension variants and/or any other ablation variant (as depicted in Table 1) in one or preferably both Fe domains Additionally, each sequence can utilize any other heterodimeric Fc variant as depicted in Tables 12-17.

TABLE 34

| | SEQ ID NO \| Antigen | | | | | |
|---|---|---|---|---|---|---|
| Xencor ID | Chain 1 | | Chain 2 | | Chain 3 | |
| XENP50966 | 1162 | IL23 | 1163 | IL23 | 1164 | IL23 |
| XENP50965 | 1165 | IL23 | 1166 | TL1A | 1167 | IL23 |
| XENP50963 | 1168 | IL23 | 1169 | IL23 | | |
| XENP50964 | 1170 | TL1A | 1171 | TL1A | | |
| XENP50961 | 1172 | IL23 | 1173 | IL23 | | |
| XENP50962 | 1174 | TL1A | 1175 | TL1A | | |

3D(3): 2+1 mAb-scFv

[0575] Another exemplary format utilizing Fab domains and scFv is the 2+1 mAb-scFv format (depicted schematically in FIG. 1, Panel E) which comprises a first monomer comprising a heavy chain covalently attached to a single-chain Fv (“scFv”) with a first antigen binding specificity covalently i.e., VH-CH1-hinge-CH2-CH3-domain linker-scFv, a second monomer comprising a heavy chain i.e., VH-CH1-hinge-CH2-CH3, wherein the CH2-CH3 is a second heterodimeric Fc domain complementary to the first heterodimeric Fc domain, and a light chain (LC) transfected separately so that a Fab domain having a second antigen binding specificity is formed with the variable heavy domain.

[0576] The amino acid sequence for an illustrative TL1A×IL23 bsAb in the 2+1 mAb-scFv format is depicted in Table 34 as XENP50966.

3D(4): 2+2 Fab₂-scFv₂-Fc

[0577] Another heterodimeric antibody format antibody format that finds particular use in subject anti-TL1A×anti-IL23 antibodies provided herein is the 2+2 Fab₂-scFv₂-Fc format illustrated in FIG. 1, Panel R. This antibody format includes four antigen binding domains: two Fab portions, and two scFv portions that are each attached between the Fab domains and the Fc domains.

[0578] In this embodiment, two identical first monomers each comprise, from N- to C-terminal, VH1-CH1-scFv-domain linker-CH2-CH3, where the scFv domains each comprise a second VH (VH2), a second VL (VL2) and a scFv linker. In embodiments, this format includes two identical light chains (VL1-CL). In this format, the VH1s are each a first variable heavy (VH) domain, the VL1s are each a first variable light (VL) domain, the VH2 is a second variable heavy domain, and the VL2 is a second variable light domain. In some embodiments, the format includes two identical common light chains (each VL1-CL), wherein each of the common light chains associates with one of the VH1-CH1 of the first and second monomers to form two identical Fabs (i.e., first antigen binding domains). In some embodiments, the scFv is the second antigen binding domain.

[0579] The amino acid sequence for an illustrative TL1A×IL23 bsAb in the 2+1 Fab2-scFv₂-Fc format is depicted in Table 34 as XENP50961 and XENP50962.

3D(5): 2+2 mAb-scFv

[0580] Another heterodimeric antibody format antibody format that finds particular use in subject anti-TL1A×anti-IL23 antibodies provided herein is the 2+2 mAb-scFv format illustrated in FIG. 1, Panel O. This antibody format includes four antigen binding domains: two Fab portions, and two scFv portions that are each attached to the C-terminal of one of the heavy chains.

[0581] In this embodiment, two identical first monomers each comprise, from N- to C-terminal, VH1-CH1-hinge-CH2-CH3-domain linker-scFv domain, where the scFv domains each comprise a second VH (VH2), a second VL (VL2) and a scFv linker. As for all the scFv domains herein, the scFv domain can be in either orientation, from N- to C-terminal, VH2-scFv linker-VL2 or VL2-scFv linker-VH2. Accordingly, the first monomers may comprise, from N- to C-terminal, VH1-CH1-hinge-CH2-CH3-domain linker-VH2-scFv linker-VL2 or VH1-CH1-hinge-CH2-CH3-domain linker-VL2-scFv linker-VH2. The composition also comprises a light chain, VL1-CL. In embodiments, this format includes two identical light chains (VL1-CL). In this format, the VH1s are each a first variable heavy (VH) domain, the VL1s are each a first variable light (VL) domain, the VH2 is a second variable heavy domain, and the VL2 is a second variable light domain. In some embodiments, the format includes two identical common light chains (each VL1-CL), wherein each of the common light chains associates with one of the VH1-CH1 of the first and second monomers to form two identical Fabs (i.e., first antigen binding domains). In some embodiments, the scFv is the second antigen binding domain.

[0582] The amino acid sequence for an illustrative TL1A×IL23 bsAb in the 2+2 mAb-scFv format is depicted in Table 34 as XENP50963 and XENP50964.

[0583] In some embodiments, the Fc domains of the additional bispecific antibody formats are variant Fc domains that include ablation variants (including those shown in Table 1). In some embodiments, each of the first and second variant Fc domains include ablation variants E233P/L234V/L235A/G236_/S267K, wherein numbering is according to EU numbering.

[0584] In some embodiments for additional bispecific antibody formats that include scFv, the scFv may optionally include a charged scFv linker (including those shown in Table 4). Optionally, any of the scFvs can include G44C and A100C for improving stability. As for all the scFv domains herein, the scFv domain can be in either orientation, from N- to C-terminal, VH-scFv linker-VL or VL-scFv linker-VH.

[0585] In some embodiments, the additional bispecific antibody formats provided herein includes half-life extending variants as is known in the art. In some embodiments, the half-life extending variants are M428L/N434S, wherein numbering is according to EU numbering.

### Example 4: TL1A×IL23p19 Bispecifics are Functionally Active on Both TL1A and IL23 Axes

[0586] In order to test the hypothesis that TL1A×IL23 bispecific antibodies are able to inhibit both TL1A and IL23 signaling, initial bispecific antibodies were engineered with the TL1A and IL23 binding domains described in Examples 1A and 2B.

[0587] To evaluate the inhibitory activity of TL1A×IL-23 bispecific antibodies on the IL-23 signaling axis, an IL-23 reporter bioassay (Promega, Madison, WI) was performed. This assay employs a genetically engineered human cell line that co-expresses the IL-23 receptor and a luciferase reporter gene under the control of an IL-23-responsive element. Upon IL-23 binding, receptor-mediated signaling activates the response element, inducing luciferase expression and generating a bioluminescent signal proportional to IL-23 activity. For the assay, TL1A×IL-23 bispecifics were serially diluted and mixed with IL-23 (final concentration: 10 ng/mL in R10 medium) and incubated at 37° C. for 75 minutes. Reporter cells were then added and further incubated for 6 hours. Following incubation, Bio-Glo™ reagent (Promega) was added, and luminescence was measured using a PerkinElmer EnVision plate reader. As depicted in FIG. 2, the TL1A×IL23 bsAbs in both the OrthoFab and the 1+1 Fab-scFv-Fc format showed efficacy in inhibiting IL23 activity, albeit less potently than the bivalent IL23 mAb utilizing the same TL23 binding domain.

[0588] To assess the activity of TL1A×IL-23 bispecific antibodies on the TL1A axis, a TL1A-responsive luciferase reporter Jurkat cell line (BPS Bioscience, San Diego, CA) was used. These cells stably express a luciferase reporter under the control of NFκB response elements, enabling quantification of TL1A-mediated signaling through bioluminescence. Briefly in the standard assay format, 5×10⁵ reporter cells in R10 medium were seeded into plates and cultured overnight. The following day, cells were resuspended and seeded at 30,000 cells per well, then incubated with TL1A×IL-23 bispecific test articles across a serial dilution range (120 nM to 0.002 nM). Plates were incubated at 37° C. for 5 hours. After incubation, Bio-Glo™ reagent (Promega) was added, and luminescence was measured using a PerkinElmer EnVision plate reader. As depicted in FIG. 3, TL1A×IL23 bsAbs in both the OrthoFab and the 1+1 Fab-scFv-Fc format showed efficacy in inhibiting TL1A activity comparable to the bivalent TL1A mAb utilizing the same TL1A binding domain.

[0589] In another set of experiments, TL1A×TL23 bispecifics utilizing anti-TL1A clone 069 or clone 111 were investigated. As depicted in FIG. 10, these bispecific antibodies were also efficacious in inhibiting TL1A activity. While additional anti-TL1A binding domains were suitable, the 041 clone was selected for further development as it demonstrated superior pharmacokinetics in bivalent monospecific mAb format (Table 35). Table 35 depicts serum concentration of bivalent TL1A mAbs based on Clone 041, Clone 069, or Clone 111 in cynomolgus monkeys dosed at 5 mg/kg.

TABLE 35

| TL1A Clone | t_{1/2} (day) | Cₘₐₓ (μg/mL) | AUCₗₐₛₜ (day*μg/mL) |
|---|---|---|---|
| 111 | 21.8 | 184 | 1380 |
| 041 | 29.5 | 213 | 1560 |
| 069 | 18.8 | 183 | 1170 |

[0590] To deconvolute the monovalent activities of the TL1A and IL23 binding domains, a bispecific antibody was generated pairing the TL1A binding domain with an RSV binding domain. As depicted in FIG. 11, XENP49320 having monovalent binding for TL1A via the 041 binding domain was less efficacious than corresponding bivalent TL1A mAb.

### Example 5: Engineering Affinity Enhanced TL1A and IL23p19 Binding Domains

[0591] As per Example 4, monovalent stoichiometry of the TL1A clone 041 and IL23 clone IL23-A in the bispecific antibodies reduces the effective potency of the bispecific molecule due to the reduced number of binding sites relative to the bivalent counterparts. This was further investigated via mechanism-based quantitative systems pharmacology (QSP) model to fit the drug pharmacokinetic and pharmacodynamic data along with in-vivo binding. The QSP model was used to simulate the anticipated PK profile of the intended bispecific owing to target mediated drug deposition (TMDD) from the anti-TL1A Fab, the extended antibody half-life due to mutations in the antibody Fc region to improve binding to FcRn, as well as to predict the expected binding to TL1A or IL23 with bispecific antibody at a range of dose levels and regiments. Based on these simulations, approximately 3-fold improvement in Fab binding affinity towards both TL1A and TL23 was predicted to achieve similar level of target engagement at the comparator bivalent antibodies.

[0592] Accordingly, TL1A clone 041 variants described in Example 1B and IL23 clone IL23-A variants described in Example 2A were generated. To identify favorites, initial variants from either the output of phage display for TL1A clone 041 or rational design for IL23 clone TL23-A were recombinantly made, and investigated for their binding via Octet, a BioLayer Interferometry (BLI)-based method, or Biacore, surface plasmon resonance (SPR)-based method. Experimental steps for Biacore generally included the following: Immobilization (capture of ligand onto a sensor chip); Association (flowing of various concentrations of analyte over sensor chip); and Dissociation (flowing buffer over the sensor chips) in order to determine the affinity of the test articles. Experimental steps for Octet generally include the following: Immobilization (capture of ligand to a biosensor); Association (dipping of ligand-coated biosensors into wells containing serial dilutions of the analyte); and Dissociation (returning of biosensors to well containing buffer) in order to determine the affinity of the test articles.

[0593] For initial screening, only a single concentration of analyte was used, and dissociation rate (k_{off}) ranking was used to pick a subset of VH and VL variants to move forward. These subsets of variants were engineered in the relevant bispecific antibody formats, and more accurate K_{D} values were determined. The favorite VH and VL variants were then combined as VH/VL pairs and engineered in the relevant bispecific antibody formats for further assessment. In the case of 041, favorite VH/VL affinity variants were further paired with superhumanization substitutions that did not impact affinity. Affinities for exemplary variants are depicted in Tables 36-40. Table 36 depicts Octet screening of illustrative 041 variants (produced as His-tagged Fabs). Table 37 depicts binding affinity of illustrative 041 variants combined with superhumanization variants (produced as 1+1 Fab-scFv-Fc bispecific antibodies) for TL1A at 37° C. Table 38 depicts Biacore screening of illustrative IL23-A variants (produced as His-tagged Fabs) that were shortlisted based on off rate ranking. Table 39 depicts binding affinity of illustrative IL23-A variants (produced as 1+1 Fab-scFv-Fc bispecific antibodies) for IL23 at 37° C. Table 40 depicts binding affinity of illustrative IL23-A variants (produced as 1+1 Fab-scFv-Fc bispecific antibodies) for IL23 at 37° C. In particular as depicted in FIG. 8 for exemplary 041 and IL23-A affinity-engineered variants, dissociation rate was significantly improved over the parental clone.

TABLE 36

| | K_{D} (M) | kₐ (1/Ms) | k_{d} (1/s) |
|---|---|---|---|
| TL1a (041 H1L1), Fab-His | 1.17E−10 | 2.53E+06 | 2.96E−04 |
| | 1.20E−10 | 2.39E+06 | 2.87E−04 |
| 041[TL1A]_H1.95_{—} | 1.64E−11 | 7.14E+06 | 1.17E−04 |
| L1.76_Fab_His | 1.71E−11 | 6.59E+06 | 1.13E−04 |
| 041[TL1A]_H1.127_L1_Fab_His | 3.77E−11 | 4.80E+06 | 1.81E−04 |
| | 3.84E−11 | 4.59E+06 | 1.76E−04 |
| 041[TL1A]_H1.128_L1_Fab_His | 2.21E−11 | 4.44E+06 | 9.79E−05 |
| | 2.27E−11 | 4.15E+06 | 9.43E−05 |
| 041[TL1A]_H1.150_L1_Fab_His | 1.58E−10 | 1.05E+06 | 1.67E−04 |
| | 1.59E−10 | 1.02E+06 | 1.61E−04 |
| 041[TL1A]_H1.156_L1_Fab_His | 1.40E−10 | 2.10E+06 | 2.93E−04 |
| | 1.37E−10 | 2.04E+06 | 2.78E−04 |

TABLE 37

| XENP | Short Name | K_{D} (M) | kₐ (1Ms) | k_{d} (1/s) |
|---|---|---|---|---|
| 49335 | TL1a (041 H1L1 Fab) × IL23 (IL23-A H1L1 scFv) | 1.90E−10 | 1.08E+06 | 2.05E−04 |
| 49335 | TL1a (041 H1L1 Fab) × IL23 (IL23-A H1L1 scFv) | 1.79E−10 | 1.16E+06 | 2.07E−04 |
| 52371 | 041[TL1A]_H1_L1.25_Fab × IL23-A[IL23]_H1L1 | 1.92E−10 | 1.05E+06 | 2.01E−04 |
| 52371 | 041[TL1A]_H1_L1.25_Fab × IL23-A[IL23]_H1L1 | 2.03E−10 | 9.93E+05 | 2.02E−04 |
| 52372 | 041[TL1A]_H1_L1.26_Fab × IL23-A[IL23]_H1L1 | 1.83E−10 | 1.02E+06 | 1.86E−04 |
| 52372 | 041[TL1A]_H1_L1.26_Fab × IL23-A[IL23]_H1L1 | 1.66E−10 | 1.11E+06 | 1.85E−04 |
| 52373 | 041[TL1A]_H1_L1.27_Fab × IL23-A[IL23]_H1L1 | 1.95E−10 | 1.05E+06 | 2.04E−04 |
| 52373 | 041[TL1A]_H1_L1.27_Fab × IL23-A[IL23]_H1L1 | 1.85E−10 | 1.11E+06 | 2.05E−04 |
| 52374 | 041[TL1A]_H1.95_L1_Fab × IL23-A[IL23]_H1L1 | 4.19E−11 | 1.95E+06 | 8.18E−05 |
| 52374 | 041[TL1A]_H1.95_L1_Fab × IL23-A[IL23]_H1L1 | 3.73E−11 | 2.19E+06 | 8.18E−05 |
| 52382 | 041[TL1A]_H1.127_L1_Fab × IL23-A[IL23]_H1L1 | 9.13E−11 | 1.72E+06 | 1.57E−04 |
| 52382 | 041[TL1A]_H1.127_L1_Fab × IL23-A[IL23]_H1L1 | 9.80E−11 | 1.58E+06 | 1.55E−04 |
| 52383 | 041[TL1A]_H1.127_L1.25_Fab × IL23-A[IL23]_H1L1 | 9.88E−11 | 1.54E+06 | 1.53E−04 |
| 52383 | 041[TL1A]_H1.127_L1.25_Fab × IL23-A[IL23]_H1L1 | 1.02E−10 | 1.55E+06 | 1.58E−04 |
| 52384 | 041[TL1A]_H1.127_L1.26_Fab × IL23-A[IL23]_H1L1 | 9.85E−11 | 1.39E+06 | 1.37E−04 |
| 52384 | 041[TL1A]_H1.127_L1.26_Fab × IL23-A[IL23]_H1L1 | 9.20E−11 | 1.50E+06 | 1.38E−04 |
| 52385 | 041[TL1A]_H1.127_L1.27_Fab × IL23-A[IL23]_H1L1 | 8.20E−11 | 1.87E+06 | 1.53E−04 |
| 52385 | 041[TL1A]_H1.127_L1.27_Fab × IL23-A[IL23]_H1L1 | 7.76E−11 | 2.07E+06 | 1.61E−04 |
| 52386 | 041[TL1A]_H1.128_L1_Fab × IL23-A[IL23]_H1L1 | 8.13E−11 | 1.63E+06 | 1.32E−04 |
| 52386 | 041[TL1A]_H1.128_L1_Fab × IL23-A[IL23]_H1L1 | 6.33E−11 | 2.21E+06 | 1.40E−04 |
| 52387 | 041[TL1A]_H1.128_L1.25_Fab × IL23-A[IL23]_H1L1 | 9.81E−11 | 1.31E+06 | 1.28E−04 |
| 52387 | 041[TL1A]_H1.128_L1.25_Fab × IL23-A[IL23]_H1L1 | 1.01E−10 | 1.37E+06 | 1.38E−04 |
| 52388 | 041[TL1A]_H1.128_L1.26_Fab × IL23-A[IL23]_H1L1 | 1.17E−10 | 1.24E+06 | 1.44E−04 |
| 52388 | 041[TL1A]_H1.128_L1.26_Fab × IL23-A[IL23]_H1L1 | 1.17E−10 | 1.26E+06 | 1.47E−04 |
| 52389 | 041[TL1A]_H1.128_L1.27_Fab × IL23-A[IL23]_H1L1 | 8.70E−11 | 1.47E+06 | 1.28E−04 |
| 52389 | 041[TL1A]_H1.128_L1.27_Fab × IL23-A[IL23]_H1L1 | 8.20E−11 | 1.55E+06 | 1.27E−04 |
| 52390 | 041[TL1A]_H1.132_L1_Fab × IL23-A[IL23]_H1L1 | 9.68E−11 | 1.22E+06 | 1.18E−04 |
| 52390 | 041[TL1A]_H1.132_L1_Fab × IL23-A[IL23]_H1L1 | 5.86E−11 | 2.14E+06 | 1.26E−04 |
| 52391 | 041[TL1A]_H1.132_L1.25_Fab × IL23-A[IL23]_H1L1 | 9.30E−11 | 1.23E+06 | 1.14E−04 |
| 52391 | 041[TL1A]_H1.132_L1.25_Fab × IL23-A[IL23]_H1L1 | 9.28E−11 | 1.31E+06 | 1.21E−04 |
| 52392 | 041[TL1A]_H1.132_L1.26_Fab × IL23-A[IL23]_H1L1 | 1.18E−10 | 1.09E+06 | 1.29E−04 |
| 52392 | 041[TL1A]_H1.132_L1.26_Fab × IL23-A[IL23]_H1L1 | 1.08E−10 | 1.15E+06 | 1.24E−04 |
| 52393 | 041[TL1A]_H1.132_L1.27_Fab × IL23-A[IL23]_H1L1 | 1.12E−10 | 1.09E+06 | 1.23E−04 |
| 52393 | 041[TL1A]_H1.132_L1.27_Fab × IL23-A[IL23]_H1L1 | 9.90E−11 | 1.19E+06 | 1.18E−04 |
| 52394 | 041[TL1A]_H1.95_L1.76_Fab × IL23-A[IL23]_H1L1 | 6.91E−11 | 1.72E+06 | 1.19E−04 |
| 52394 | 041[TL1A]_H1.95_L1.76_Fab × IL23-A[IL23]_H1L1 | 7.00E−11 | 1.75E+06 | 1.23E−04 |
| 52395 | 041[TL1A]_H1.115_L1.95_Fab × IL23-A[IL23]_H1L1 | 2.48E−10 | 1.29E+06 | 3.20E−04 |
| 52395 | 041[TL1A]_H1.115_L1.95_Fab × IL23-A[IL23]_H1L1 | 2.57E−10 | 1.31E+06 | 3.36E−04 |
| 52396 | 041[TL1A]_H1_L1.76_Fab × IL23-A[IL23]_H1L1 | 5.85E−10 | 8.37E+05 | 4.90E−04 |
| 52396 | 041[TL1A]_H1_L1.76_Fab × IL23-A[IL23]_H1L1 | 5.87E−10 | 8.80E+05 | 5.17E−04 |

TABLE 38

| | K_{D} (M) | kₐ (1/Ms) | k_{d} (1/s) |
|---|---|---|---|
| IL23-A[IL23]_H1L1_Fab | 1.79E−11 | 2.49E+06 | 4.47E−05 |
| IL23-A[IL23]_H1.13_L1_Fab | 2.00E−11 | 3.02E+06 | 6.05E−05 |
| IL23-A[IL23]_H1.25_L1_Fab | 1.81E−11 | 3.15E+06 | 5.71E−05 |
| IL23-A[IL23]_H1.26_L1_Fab | 1.44E−11 | 4.21E+06 | 6.06E−05 |
| IL23-A[IL23]_H1.27_L1_Fab | 1.54E−11 | 3.83E+06 | 5.91E−05 |
| IL23-A[IL23]_H1.28_L1_Fab | 1.40E−11 | 4.08E+06 | 5.70E−05 |
| IL23-A[IL23]_H1.37_L1_Fab | 3.65E−11 | 3.30E+06 | 1.20E−04 |
| IL23-A[IL23]_H1.41_L1_Fab | 2.14E−11 | 2.02E+06 | 4.33E−05 |
| IL23-A[IL23]_H1.55_L1_Fab | 2.36E−11 | 1.71E+06 | 4.03E−05 |
| IL23-A[IL23]_H1.82_L1_Fab | 2.11E−11 | 2.46E+06 | 5.20E−05 |
| IL23-A[IL23]_H1.88_L1_Fab | 2.07E−11 | 2.49E+06 | 5.16E−05 |
| IL23-A[IL23]_H1.89_L1_Fab | 1.82E−11 | 2.99E+06 | 5.43E−05 |
| IL23-A[IL23]_H1.90_L1_Fab | 1.77E−11 | 2.76E+06 | 4.89E−05 |
| IL23-A[IL23]_H1.91_L1_Fab | 2.10E−11 | 3.09E+06 | 6.50E−05 |
| IL23-A[IL23]_H1.92_L1_Fab | 1.76E−11 | 2.59E+06 | 4.57E−05 |
| IL23-A[IL23]_H1.93_L1_Fab | 1.93E−11 | 3.10E+06 | 5.98E−05 |
| IL23-A[IL23]_H1.101_L1_Fab | 1.68E−11 | 2.66E+06 | 4.47E−05 |
| IL23-A[IL23]_H1.102_L1_Fab | 4.42E−11 | 1.26E+06 | 5.55E−05 |
| IL23-A[IL23]_H1.104_L1_Fab | 2.15E−11 | 2.66E+06 | 5.72E−05 |
| IL23-A[IL23]_H1.113_L1_Fab | 2.60E−11 | 1.96E+06 | 5.11E−05 |
| IL23-A[IL23]_H1.114_L1_Fab | 1.91E−11 | 2.61E+06 | 4.96E−05 |
| IL23-A[IL23]_H1.120_L1_Fab | 2.28E−11 | 2.55E+06 | 5.82E−05 |
| IL23-A[IL23]_H1.132_L1_Fab | 2.38E−11 | 2.72E+06 | 6.48E−05 |
| IL23-A[IL23]_H1.137_L1_Fab | 4.40E−11 | 1.61E+06 | 7.08E−05 |
| IL23-A[IL23]_H1.138_L1_Fab | 2.60E−11 | 2.26E+06 | 5.89E−05 |
| IL23-A[IL23]_H1.140_L1_Fab | 2.59E−11 | 1.89E+06 | 4.89E−05 |
| IL23-A[IL23]_H1.141_L1_Fab | 3.49E−11 | 1.16E+06 | 4.06E−05 |
| IL23-A[IL23]_H1.142_L1_Fab | 3.84E−11 | 1.19E+06 | 4.56E−05 |
| IL23-A[IL23]_H1.143_L1_Fab | 8.05E−11 | 2.42E+06 | 1.95E−04 |
| IL23-A[IL23]_H1.147_L1_Fab | 2.79E−11 | 2.96E+06 | 8.25E−05 |
| IL23-A[IL23]_H1.149_L1_Fab | 3.99E−11 | 3.00E+06 | 1.20E−04 |
| IL23-A[IL23]_H1.156_L1_Fab | 1.73E−09 | 2.15E+05 | 3.71E−04 |
| IL23-A[IL23]_H1.168_L1_Fab | 9.09E−11 | 2.58E+06 | 2.35E−04 |
| IL23-A[IL23]_H1.169_L1_Fab | 2.24E−11 | 6.64E+06 | 1.48E−04 |
| IL23-A[IL23]_H1.182_L1_Fab | 4.73E−10 | 4.76E+05 | 2.25E−04 |
| IL23-A[IL23]_H1.187_L1_Fab | 2.75E−11 | 1.76E+06 | 4.83E−05 |
| IL23-A[IL23]_H1.188_L1_Fab | 3.68E−11 | 1.83E+06 | 6.73E−05 |
| IL23-A[IL23]_H1.189_L1_Fab | 7.68E−11 | 2.39E+06 | 1.84E−04 |
| IL23-A[IL23]_H1.190_L1_Fab | 5.48E−11 | 3.18E+06 | 1.75E−04 |
| IL23-A[IL23]_H1.191_L1_Fab | 2.56E−10 | 1.97E+06 | 5.05E−04 |
| IL23-A[IL23]_H1.192_L1_Fab | 1.50E−10 | 8.10E+05 | 1.21E−04 |
| IL23-A[IL23]_H1_L1.50_Fab | 2.56E−11 | 2.45E+06 | 6.28E−05 |
| IL23-A[IL23]_H1_L1.54_Fab | 1.56E−10 | 3.69E+05 | 5.76E−05 |
| IL23-A[IL23]_H1_L1.58_Fab | 1.50E−10 | 3.38E+05 | 5.06E−05 |
| IL23-A[IL23]_H1_L1.65_Fab | 2.14E−11 | 2.09E+06 | 4.48E−05 |
| IL23-A[IL23]_H1_L1.69_Fab | 2.02E−11 | 2.02E+06 | 4.08E−05 |

TABLE 39

| XENP | | K_{D} (M) | kₐ (1/Ms) | k_{d} (1/s) |
|---|---|---|---|---|
| 49699 | IL23-A[IL23]_H1L1_Fab- | 1.36E−10 | 6.37E+05 | 8.68E−05 |
| | 041[TL1a]_H1_G44C_L1_A100C | | | |
| 52850 | IL23-A[IL23]_H2L1_Fab- | 1.37E−10 | 5.63E+05 | 7.70E−05 |
| | 041[TL1a]_H1_G44C_L1_A100C | | | |
| 53110 | IL23-A[IL23]_H1_L1.71_Fab- | 1.13E−10 | 7.43E+05 | 8.40E−05 |
| | 041[TL1a]_H1_G44C_L1_A100C | | | |
| 53111 | IL23-A[IL23]_H1_L1.69_Fab- | 6.68E−11 | 9.58E+05 | 6.40E−05 |
| | 041[TL1a]_H1_G44C_L1_A100C | | | |
| 53112 | IL23-A[IL23]_H1_L1.58_Fab- | 1.56E−10 | 5.79E+05 | 9.02E−05 |
| | 041[TL1a]_H1_G44C_L1_A100C | | | |
| 53113 | IL23-A[IL23]_H1_L1.79_Fab- | 7.88E−11 | 6.61E+05 | 5.21E−05 |
| | 041[TL1a]_H1_G44C_L1_A100C | | | |
| 53114 | IL23-A[IL23]_H1_L1.42_Fab- | 1.27E−10 | 5.94E+05 | 7.57E−05 |
| | 041[TL1a]_H1_G44C_L1_A100C | | | |
| 53115 | IL23-A[IL23]_H2_L1.71_Fab- | 1.19E−10 | 5.49E+05 | 6.55E−05 |
| | 041[TL1a]_H1_G44C_L1_A100C | | | |
| 53116 | IL23-A[IL23]_H2_L1.69_Fab- | 6.71E−11 | 7.46E+05 | 5.01E−05 |
| | 041[TL1a]_H1_G44C_L1_A100C | | | |
| 53117 | IL23-A[IL23]_H2_L1.58_Fab- | 1.49E−10 | 4.69E+05 | 7.00E−05 |
| | 041[TL1a]_H1_G44C_L1_A100C | | | |
| 53118 | IL23-A[IL23]_H2_L1.79_Fab- | 8.25E−11 | 5.86E+05 | 4.83E−05 |
| | 041[TL1a]_H1_G44C_L1_A100C | | | |
| 53119 | IL23-A[IL23]_H2_L1.42_Fab- | 1.38E−10 | 4.88E+05 | 6.73E−05 |
| | 041[TL1a]_H1_G44C_L1_A100C | | | |

TABLE 40

| XENP | | K_{D} (M) | kₐ (1/Ms) | k_{d} (1/s) |
|---|---|---|---|---|
| 49699 | IL23-A[IL23]_H1L1_Fab- | 9.90E−11 | 6.58E+05 | 6.51E−05 |
| | 041[TL1a]_H1_G44C_L1_A100C | | | |
| 53194 | IL23-A[IL23]_H1_L1.114_Fab- | 5.88E−11 | 8.09E+05 | 4.76E−05 |
| | 041[TL1a]_H1_G44C_L1_A100C | | | |
| 53195 | IL23-A[IL23]_H1_L1.115_Fab- | 1.97E−11 | 9.45E+05 | 1.86E−05 |
| | 041[TL1a]_H1_G44C_L1_A100C | | | |
| 53196 | IL23-A[IL23]_H1_L1.116_Fab- | 3.25E−11 | 9.14E+05 | 2.97E−05 |
| | 041[TL1a]_H1_G44C_L1_A100C | | | |
| 53197 | IL23-A[IL23]_H1.41_L1_Fab- | 1.12E−10 | 5.49E+05 | 6.16E−05 |
| | 041[TL1a]_H1_G44C_L1_A100C | | | |
| 53198 | IL23-A[IL23]_H1.55_L1_Fab- | 8.67E−11 | 7.68E+05 | 6.66E−05 |
| | 041[TL1a]_H1_G44C_L1_A100C | | | |
| 53199 | IL23-A[IL23]_H1.94_L1_Fab- | 8.57E−11 | 8.26E+05 | 7.07E−05 |
| | 041[TL1a]_H1_G44C_L1_A100C | | | |
| 53200 | IL23-A[IL23]_H1.101_L1_Fab- | 8.43E−11 | 8.35E+05 | 7.04E−05 |
| | 041[TL1a]_H1_G44C_L1_A100C | | | |
| 53201 | IL23-A[IL23]_H1.113_L1_Fab- | 8.60E−11 | 1.05E+06 | 9.00E−05 |
| | 041[TL1a]_H1_G44C_L1_A100C | | | |
| 53202 | IL23-A[IL23]_H1.125_L1_Fab- | 1.02E−10 | 8.13E+05 | 8.30E−05 |
| | 041[TL1a]_H1_G44C_L1_A100C | | | |
| 53203 | IL23-A[IL23]_H1.140_L1_Fab- | 1.71E−10 | 4.81E+05 | 8.24E−05 |
| | 041[TL1a]_H1_G44C_L1_A100C | | | |
| 53204 | IL23-A[IL23]_H1.141_L1_Fab- | 1.44E−10 | 5.64E+05 | 8.15E−05 |
| | 041[TL1a]_H1_G44C_L1_A100C | | | |
| 53205 | IL23-A[IL23]_H1.142_L1_Fab- | 1.66E−10 | 5.43E+05 | 8.99E−05 |
| | 041[TL1a]_H1_G44C_L1_A100C | | | |
| 53206 | IL23-A[IL23]_H1.169_L1_Fab- | 1.57E−10 | 4.57E+05 | 7.16E−05 |
| | 041[TL1a]_H1_G44C_L1_A100C | | | |
| 53207 | IL23-A[IL23]_H1.187_L1_Fab- | 1.08E−10 | 8.01E+05 | 8.68E−05 |
| | 041[TL1a]_H1_G44C_L1_A100C | | | |
| 53208 | IL23-A[IL23]_H1.195_L1_Fab- | 5.61E−10 | 8.83E+04 | 4.96E−05 |
| | 041[TL1a]_H1_G44C_L1_A100C | | | |
| 53209 | IL23-A[IL23]_H1.195_L1.116_Fab- | 2.19E−10 | 2.86E+05 | 6.26E−05 |
| | 041 [TL1a]_H1_G44C_L1_A100C | | | |
| 53210 | IL23-A[IL23]_H1.94_L1.116_Fab- | 1.24E−11 | 1.11E+06 | 1.38E−05 |
| | 041[TL1a]_H1_G44C_L1_A100C | | | |
| 53211 | IL23-A[IL23]_H1.187_L1.116_Fab- | 3.01E−11 | 1.22E+06 | 3.67E−05 |
| | 041[TL1a]_H1_G44C_L1_A100C | | | |
| 53212 | IL23-A[IL23]_H1.169_L1.116_Fab- | 4.23E−11 | 8.34E+05 | 3.52E−05 |
| | 041 [TL1a]_H1_G44C_L1_A100C | | | |
| 53213 | IL23-A[IL23]_H1.101_L1.116_Fab- | 2.37E−11 | 1.30E+06 | 3.08E−05 |
| | 041[TL1a]_H1_G44C_L1_A100C | | | |
| 53214 | IL23-A[IL23]_H1.94_L1.69_Fab- | 2.95E−11 | 1.34E+06 | 3.94E−05 |
| | 041[TL1a]_H1_G44C_L1_A100C | | | |
| 53215 | IL23-A[IL23]_H1.94_L1.58_Fab- | 1.19E−10 | 4.90E+05 | 5.84E−05 |
| | 041[TL1a]_H1_G44C_L1_A100C | | | |
| 53216 | IL23-A[IL23]_H1.94_L1.79_Fab- | 6.38E−11 | 5.56E+05 | 3.55E−05 |
| | 041[TL1a]_H1_G44C_L1_A100C | | | |
| 53217 | IL23-A[IL23]_H1.101_L1.69_Fab- | 6.41E−11 | 7.33E+05 | 4.70E−05 |
| | 041[TL1a]_H1_G44C_L1_A100C | | | |
| 53218 | IL23-A[IL23]_H1.101_L1.58_Fab- | 1.57E−10 | 4.77E+05 | 7.50E−05 |
| | 041[TL1a]_H1_G44C_L1_A100C | | | |
| 53219 | IL23-A[IL23]_H1.101_L1.79_Fab- | 9.11E−11 | 5.11E+05 | 4.65E−05 |
| | 041[TL1a]_H1_G44C_L1_A100C | | | |
| 53220 | IL23-A[IL23]_H1.169_L1.69_Fab- | 4.66E−11 | 8.39E+05 | 3.91E−05 |
| | 041[TL1a]_H1_G44C_L1_A100C | | | |
| 53221 | IL23-A[IL23]_H1.169_L1.58_Fab- | 9.89E−11 | 5.37E+05 | 5.31E−05 |
| | 041[TL1a]_H1_G44C_L1_A100C | | | |
| 53222 | IL23-A[IL23]_H1.169_L1.79_Fab- | 6.14E−11 | 6.39E+05 | 3.92E−05 |
| | 041[TL1a]_H1_G44C_L1_A100C | | | |
| 53223 | IL23-A[IL23]_H1.187_L1.69_Fab- | 2.84E−11 | 1.83E+06 | 5.18E−05 |
| | 041[TL1a]_H1_G44C_L1_A100C | | | |
| 53224 | IL23-A[IL23]_H1.187_L1.58_Fab- | 6.98E−11 | 1.06E+06 | 7.40E−05 |
| | 041[TL1a]_H1_G44C_L1_A100C | | | |
| 53225 | IL23-A[IL23]_H1.187_L1.79_Fab- | 6.57E−11 | 6.85E+05 | 4.50E−05 |
| | 041[TL1a]_H1_G44C_L1_A100C | | | |
| 53226 | IL23-A[IL23]_H1.195_L1.69_Fab- | 1.36E−09 | 1.59E+04 | 2.16E−05 |
| | 041[TL1a]_H1_G44C_L1_A100C | | | |
| 53227 | IL23-A[IL23]_H1.195_L1.58_Fab- | 1.49E−09 | 5.72E+04 | 8.52E−05 |
| | 041[TL1a]_H1_G44C_L1_A100C | | | |
| 53228 | IL23-A[IL23]_H1.195_L1.79_Fab- | 5.14E−10 | 1.58E+05 | 8.10E−05 |
| | 041[TL1a]_H1_G44C_L1_A100C | | | |
| 53282 | IL23-A[IL23]_H1_L1.117_Fab- | 1.46E−11 | 1.77E+06 | 2.58E−05 |
| | 041[TL1a]_H1_G44C_L1_A100C | | | |
| 53283 | IL23-A[IL23]_H1.41_L1.117_Fab- | 9.56E−12 | 1.75E+06 | 1.67E−05 |
| | 041[TL1a]_H1_G44C_L1_A100C | | | |
| 53284 | IL23-A[IL23]_H1.55_L1.117_Fab- | 1.33E−11 | 1.66E+06 | 2.21E−05 |
| | 041[TL1a]_H1_G44C_L1_A100C | | | |
| 53285 | IL23-A[IL23]_H1.94_L1.117_Fab- | 1.19E−11 | 1.81E+06 | 2.15E−05 |
| | 041[TL1a]_H1_G44C_L1_A100C | | | |
| 53286 | IL23-A[IL23]_H1.101_L1.117_Fab- | 1.38E−11 | 1.58E+06 | 2.18E−05 |
| | 041[TL1a]_H1_G44C_L1_A100C | | | |
| 53287 | IL23-A[IL23]_H1.113_L1.117_Fab- | 1.29E−11 | 1.76E+06 | 2.27E−05 |
| | 041[TL1a]_H1_G44C_L1_A100C | | | |
| 53288 | IL23-A[IL23]_H1.125_L1.117_Fab- | 1.37E−11 | 1.39E+06 | 1.90E−05 |
| | 041[TL1a]_H1_G44C_L1_A100C | | | |
| 53289 | IL23-A[IL23]_H1.140_L1.117_Fab- | 1.82E−11 | 1.19E+06 | 2.16E−05 |
| | 041[TL1a]_H1_G44C_L1_A100C | | | |
| 53290 | IL23-A[IL23]_H1.141_L1.117_Fab- | 1.14E−11 | 1.29E+06 | 1.47E−05 |
| | 041[TL1a]_H1_G44C_L1_A100C | | | |
| 53291 | IL23-A[IL23]_H1.142_L1.117_Fab- | 1.56E−11 | 1.30E+06 | 2.03E−05 |
| | 041[TL1a]_H1_G44C_L1_A100C | | | |
| 53292 | IL23-A[IL23]_H1.169_L1.117_Fab- | 1.58E−11 | 8.69E+05 | 1.37E−05 |
| | 041[TL1a]_H1_G44C_L1_A100C | | | |
| 53293 | IL23-A[IL23]_H1.187_L1.117_Fab- | 1.18E−11 | 1.57E+06 | 1.85E−05 |
| | 041[TL1a]_H1_G44C_L1_A100C | | | |
| 53294 | IL23-A[IL23]_H1.195_L1.117_Fab- | 1.61E−10 | 2.81E+05 | 4.51E−05 |
| | 041[TL1a]_H1_G44C_L1_A100C | | | |

[0594] The variants were first investigated in the 1+1 Fab-scFv-Fc format. Data depicting TL1A and IL23 inhibitory activities are depicted in Tables 41 and 42. Table 41 depicts IL23 inhibition IC₅₀ values for TL1A×IL-23 bispecific antibodies in the 1+1 Fab-scFv-Fc format, along with controls, incorporating affinity-engineered IL23-A variants and the parental 041. Table 42 depicts TL1A inhibition IC₅₀ values for TL1A×IL-23 bispecific antibodies in the 1+1 Fab-scFv-Fc format, along with controls, incorporating affinity-engineered 041 variants and the parental IL23-A. Notably, improved affinity did not always correspond to improved inhibitory activity, so this investigation was crucial for determining the top bispecific candidates.

TABLE 41

| | IC₅₀ (pM) |
|---|---|
| XENP53282 IL23 (IL23-A H1_L1.117) × | 12.65 |
| TL1a, 1 + 1 bottle-opener, FcKO Xtend | |
| XENP53288 IL23 (IL23-A H1.125_L1.117) × | 13.54 |
| TL1a, 1 + 1 bottle-opener, FcKO Xtend | |
| XENP53293 IL23 (IL23-A H1.187_L1.117) × | 13.78 |
| TL1a, 1 + 1 bottle-opener, FcKO Xtend | |
| XENP53291 IL23 (IL23-A H1.142_L1.117) × | 14.27 |
| TL1a, 1 + 1 bottle-opener, FcKO Xtend | |
| XENP53286 IL23 (IL23-A H1.101_L1.117) × | 16.42 |
| TL1a, 1 + 1 bottle-opener, FcKO Xtend | |
| XENP53292 IL23 (IL23-A H1.169_L1.117) × | 18.43 |
| TL1a, 1 + 1 bottle-opener, FcKO Xtend | |
| XENP53285 IL23 (IL23-A H1.94_L1.117) × | 18.59 |
| TL1a, 1 + 1 bottle-opener, FcKO Xtend | |
| XENP53214 IL23 (IL23-A H1.94_L1.69) × | 19.88 |
| TL1a, 1 + 1 bottle-opener, FcKO Xtend | |
| XENP53213 IL23 (IL23-A H1.101_L1.116) × | 21.18 |
| TL1a, 1 + 1 bottle-opener, FcKO Xtend | |
| XENP53211 IL23 (IL23-A H1.187_L1.116) × | 21.58 |
| TL1a, 1 + 1 bottle-opener, FcKO Xtend | |
| XENP53290 IL23 (IL23-A H1.141_L1.117) × | 21.95 |
| TL1a, 1 + 1 bottle-opener, FcKO Xtend | |
| XENP53287 IL23 (IL23-A H1.113_L1.117) × | 22.84 |
| TL1a, 1 + 1 bottle-opener, FcKO Xtend | |
| XENP53216 IL23 (IL23-A H1.94_L1.79) × | 24.62 |
| TL1a, 1 + 1 bottle-opener, FcKO Xtend | |
| XENP53217 IL23 (IL23-A H1.101_L1.69) × | 24.76 |
| TL1a, 1 + 1 bottle-opener, FcKO Xtend | |
| XENP53284 IL23 (IL23-A H1.55_L1.117) × | 26.41 |
| TL1a, 1 + 1 bottle-opener, FcKO Xtend | |
| XENP53289 IL23 (IL23-A H1.140_L1.117) × | 28.24 |
| TL1a, 1 + 1 bottle-opener, FcKO Xtend | |
| XENP53219 IL23 (IL23-A H1.101_L1.79) × | 28.7 |
| TL1a, 1 + 1 bottle-opener, FcKO Xtend | |
| XENP53223 IL23 (IL23-A H1.187_L1.69) × | 29.72 |
| TL1a, 1 + 1 bottle-opener, FcKO Xtend | |
| XENP53283 IL23 (IL23-A H1.41_L1.117) × | 30.66 |
| TL1a, 1 + 1 bottle-opener, FcKO Xtend | |
| XENP53220 IL23 (IL23-A H1.169_L1.69) × | 32.01 |
| TL1a, 1 + 1 bottle-opener, FcKO Xtend | |
| XENP53201 IL23 (IL23-A H1.113_L1) × | 32.13 |
| TL1a, 1 + 1 bottle-opener, FcKO Xtend | |
| XENP49698 IL23 (IL23-A H1L1), | 33.05 |
| bivalent, FcKO Xtend | |
| XENP53195 IL23 (IL23-A H1_L1.115) × | 33.23 |
| TL1a, 1 + 1 bottle-opener, FcKO Xtend | |
| XENP53225 IL23 (IL23-A H1.187_L1.79) × | 33.33 |
| TL1a, 1 + 1 bottle-opener, FcKO Xtend | |
| XENP53212 IL23 (IL23-A H1.169_L1.116) × | 35.16 |
| TL1a, 1 + 1 bottle-opener, FcKO Xtend | |
| XENP53196 IL23 (IL23-A H1_L1.116) × | 35.59 |
| TL1a, 1 + 1 bottle-opener, FcKO Xtend | |
| XENP53197 IL23 (IL23-A H1.41_L1) × | 36.11 |
| TL1a, 1 + 1 bottle-opener, FcKO Xtend | |
| XENP53207 IL23 (IL23-A H1.187_L1) × | 36.6 |
| TL1a, 1 + 1 bottle-opener, FcKO Xtend | |
| XENP53194 IL23 (IL23-A H1_L1.114) × | 36.99 |
| TL1a, 1 + 1 bottle-opener, FcKO Xtend | |
| XENP53210 IL23 (IL23-A H1.94_L1.116) × | 37.86 |
| TL1a, 1 + 1 bottle-opener, FcKO Xtend | |
| XENP53224 IL23 (IL23-A H1.187_L1.58) × | 40.73 |
| TL1a, 1 + 1 bottle-opener, FcKO Xtend | |
| XENP53200 IL23 (IL23-A H1.101_L1) × | 40.8 |
| TL1a, 1 + 1 bottle-opener, FcKO Xtend | |
| XENP53215 IL23 (IL23-A H1.94_L1.58) × | 42.6 |
| TL1a, 1 + 1 bottle-opener, FcKO Xtend | |
| XENP48697 IL23 (IL23-A H1L1 Fab) × | 42.73 |
| RSV, 1 + 1, Xtend FcKO | |
| XENP53222 IL23 (IL23-A H1.169_L1.79) × | 44.39 |
| TL1a, 1 + 1 bottle-opener, FcKO Xtend | |
| XENP53199 IL23 (IL23-A H1.94_L1) × | 48.64 |
| TL1a, 1 + 1 bottle-opener, FcKO Xtend | |
| XENP53198 IL23 (IL23-A H1.55_L1) × | 59.78 |
| TL1a, 1 + 1 bottle-opener, FcKO Xtend | |
| XENP53221 IL23 (IL23-A H1.169_L1.58) × | 104.1 |
| TL1a, 1 + 1 bottle-opener, FcKO Xtend | |
| XENP49699 IL23 (IL23-A H1L1) × | 109.9 |
| TL1a, 1 + 1 bottle-opener, FcKO Xtend | |

TABLE 42

| | IC₅₀ (nM) |
|---|---|
| XENP47942 041[TL1A]_H1L1 bivalent | 4.073 |
| FcKO Xtend | |
| XENP52385 041[TL1A]_H1.127_L1.27 × | 5.005 |
| IL23-A[IL23] 1 + 1 FcKO Xtend | |
| XENP52373 041[TL1A]_H1_L1.27 × | 5.048 |
| IL23-A[IL23] 1 + 1 FcKO Xtend | |
| XENP52386 041[TL1A]_H1.128_L1 × | 5.078 |
| IL23-A[IL23] 1 + 1 FcKO Xtend | |
| XENP52382 041[TL1A]_H1.127_L1 × | 5.284 |
| IL23-A[IL23] 1 + 1 FcKO Xtend | |
| XENP52387 041[TL1A]_H1.128_L1.25 × | 5.348 |
| IL23-A[IL23] 1 + 1 FcKO Xtend | |
| XENP52371 041[TL1A]_H1_L1.25 × | 5.375 |
| IL23-A[IL23] 1 + 1 FcKO Xtend | |
| XENP52372 041[TL1A]_H1_L1.26 × | 5.416 |
| IL23-A[IL23] 1 + 1 FcKO Xtend | |
| XENP52383 041[TL1A]_H1.127_L1.25 × | 5.759 |
| IL23-A[IL23] 1 + 1 FcKO Xtend | |
| XENP49320 041[TL1A]_H1L1 × | 5.764 |
| RSV1 + 1 FcKO Xtend | |
| XENP52389 041[TL1A]_H1.128_L1.27 × | 5.77 |
| IL23-A[IL23] 1 + 1 FcKO Xtend | |
| XENP52392 041[TL1A]_H1.132_L1.26 × | 5.797 |
| IL23-A[IL23] 1 + 1 FcKO Xtend | |
| XENP52393 041[TL1A]_H1.132_L1.27 × | 6.082 |
| IL23-A[IL23] 1 + 1 FcKO Xtend | |
| XENP52390 041[TL1A]_H1.132_L1 × | 6.252 |
| IL23-A[IL23] 1 + 1 FcKO Xtend | |
| XENP52396 041[TL1A]_H1_L1.76 × | 6.27 |
| IL23-A[IL23] 1 + 1 FcKO Xtend | |
| XENP52395 041[TL1A]_H1.115_L1.95 × | 6.343 |
| IL23-A[IL23] 1 + 1 FcKO Xtend | |
| XENP52388 041[TL1A]_H1.128_L1.26 × | 6.517 |
| IL23-A[IL23] 1 + 1 FcKO Xtend | |
| XENP49335 041[TL1A]_H1L1 × | 6.596 |
| IL23-A[IL23] 1 + 1 FcKO Xtend | |
| XENP52391 041[TL1A]_H1.132_L1.25 × | 7.004 |
| IL23-A[IL23] 1 + 1 FcKO Xtend | |
| XENP52374 041[TL1A]_H1.95_L1 × | 7.061 |
| IL23-A[IL23] 1 + 1 FcKO Xtend | |
| XENP52384 041[TL1A]_H1.127_L1.26 × | 7.63 |
| IL23-A[IL23] 1 + 1 FcKO Xtend | |
| XENP52394 041[TL1A]_H1.95_L1.76 × | 8.84 |
| IL23-A[IL23] 1 + 1 FcKO Xtend | |

### Example 6: Investigating Effect of Bispecific Formats

### 6A: TL1A and IL23 Inhibitory Activity

[0595] To determine whether different bispecific formats were preferable, additional formats described in Example 3 were investigated. Data depicting TL1A and IL23 inhibitory activity are depicted in FIGS. 12 and 13. Interestingly, the data shows that formats utilizing anti-IL23 as an scFv were less potent in inducing IL23 inhibition.

[0596] As the activities were otherwise comparable, formats such as the OrthoFab format and the CrossMab-based formats were preferred for their native IgG-like structures.

### 6B: Manufacturability

[0597] Surprisingly, between the OrthoFab and CrossMab, the OrthoFab was preferred, as at least in the context of the TL1A×IL23 bispecific antibodies, OrthoFab may be better when regarding manufacturability. As depicted in Table 43, transient expression (total protein produced) in CHO cells was superior for the exemplary bispecific antibodies in the OrthoFab format (XENP53369, XENP53375, XENP53412, and XENP53413) relative to exemplary bispecific antibodies in the CrossMab format (XENP53387 and XENP53415) shown in Table 44. The TL1A binding domains of XENP53412, XENP53415, and XENP53413 were derived from TL1A_041_H1.337_L1.27, the TL1A binding domains of XENP53387 and XENP53375 were derived from TL1A_041_H1.447_L1.27, and the TL1A binding domain of XENP53369 was derived from TL1A_041_H1.324_L1.27. The IL23 binding domains of XENP53412, XENP53415, XENP53387, XENP53375, and XENP53369 were derived from IL23-A_H1_L1.117, and the IL23 binding domain of XENP53413 was derived from IL23-A_H1.187_L1.116.

TABLE 43

| | Host Cell | Titer (mg/L) | Production Volume (L) |
|---|---|---|---|
| XENP53369 | CHO | 2855 | 10 |
| XENP53375 | CHO | 2871 | 10 |
| XENP53387 | CHO | 1986 | 10 |
| XENP53412 | CHO | 2576 | 10 |
| XENP53413 | CHO | 2721 | 10 |
| XENP53415 | CHO | 1577 | 10 |

TABLE 44

| | | SEQ |
|---|---|---|
| XENP53412 | sequence | ID NO: |
| Heavy Chain 1 | QVQLVQSGAEVKKPGASVKVSCKVSGFSVTSYNVHWVREAPGQGLEWMGV | 2240 |
| | MWYGGNTDYNSKFQGRVTMTRDTSTNTVYMELSSLRSEDTAVYYCARAGRY | |
| | YVDSNYYWDFPYWGQGTLVTVSSASTKGPSVFPLAPSSKSTSGGTAALGCLV | |
| | KDYFPEPVTVSWNSGALTSGVHTFPAVLQSSGLYSLSSVVTVPSSSLGTQTYIC | |
| | NVNHKPSDTKVDEKVEPDSCDKTHTCPPCPAPPVAGPSVFLFPPKPKDTLMISR | |
| | TPEVTCVVVDVKHEDPEVKFNWYVDGVEVHNAKTKPREEEYNSTYRVVSVL | |
| | TVLHQDWLNGKEYKCKVSNKALPAPIEKTISKAKGQPREPQVYTLPPSREEMT | |
| | KNQVSLTCDVSGFYPSDIAVEWESDGQPENNYKTTPPVLDSDGSFFLYSKLTVD | |
| | KSRWEQGDVFSCSVLHEALHSHYTQKSLSLSPGK | |
| TL1A Variable | QVQLVQSGAEVKKPGASVKVSCKVSGFSVTSYNVHWVREAPGQGLEWMGV | 2241 |
| heavy (vh) domain | MWYGGNTDYNSKFQGRVTMTRDTSTNTVYMELSSLRSEDTAVYYCARAGRY | |
| | YVDSNYYWDFPYWGQGTLVTVSS | |
| vhCDR1 | SYNVH | 102 |
| vhCDR2 | VMWYGGNTDYNSKFQG | 1924 |
| vhCDR3 | AGRYYVDSNYYWDFPY | 1203 |
| Light Chain 1 | DIQMTQSPSSVSASVGDRVTITCRASEDIYSGLAWYQKKPGKSPKLLIYGASSL | 2242 |
| | QDGVPSRFSGSGSGTDYTLTISSLQPEDFATYFCQEGLKSPYTFGQGTKLEIKRT | |
| | VAAPSVFIFPPSKKQLKSGTASVVCLLNNFYPREAKVQWKVDNALQSGNSQES | |
| | VTEQDSKDSTYSLSSTLTLSKADYEKHKVYACEVTHQGLSSPVTKSFNRGEC | |
| TL1A Variable light | DIQMTQSPSSVSASVGDRVTITCRASEDIYSGLAWYQKKPGKSPKLLIYGASSL | 2243 |
| (vl) domain | QDGVPSRFSGSGSGTDYTLTISSLQPEDFATYFCQEGLKSPYTFGQGTKLEIK | |
| VlCDR1 | RASEDIYSGLA | 106 |
| VlCDR2 | GASSLQD | 107 |
| VlCDR3 | QEGLKSPYT | 108 |
| Heavy Chain 2 | QVQLVQSGAEVKKPGSSVKVSCKASGYTFTDQTIHWMRKAPGQGLEWIGYIY | 2244 |
| | PRDDSPKYNENFKGKVTITADKSTSTAYMELSSLRSEDTAVYYCAIPDRSGYAW | |
| | FIYWGQGTLVTVSSASTKGPSVFPLAPSSKSTSGGTAFLGCLVKDYFPEPVTVS | |
| | WNSGALTSGVHTFPAVLQSSGLYSLSSVVTVPSSSLGTQTYICNVNHKPSNTKV | |
| | DKKVEPKSCDKTHTCPPCPAPPVAGPSVFLFPPKPKDTLMISRTPEVTCVVVDV | |
| | KHEDPEVKFNWYVDGVEVHNAKTKPREEQYNSTYRVVSVLTVLHQDWLNG | |
| | KEYKCKVSNKALPAPIEKTISKAKGQPREPQVYTLPPSREQMTKNQVKLTCLV | |
| | KGFYPSDIAVEWESNGQPENNYKTTPPVLDSDGSFFLYSKLTVDKSRWQQGNV | |
| | FSCSVLHEALHSHYTQKSLSLSPGK | |
| IL23 Variable heavy | QVQLVQSGAEVKKPGSSVKVSCKASGYTFTDQTIHWMRKAPGQGLEWIGYIY | 2233 |
| (vh) domain | PRDDSPKYNENFKGKVTITADKSTSTAYMELSSLRSEDTAVYYCAIPDRSGYAW | |
| | FIYWGQGTLVTVSS | |
| vhCDR1 | DQTIH | 180 |
| vhCDR2 | YIYPRDDSPKYNENFKG | 181 |
| vhCDR3 | PDRSGYAWFIY | 182 |
| Light Chain 2 | DIQMTQSPSSLSASVGDRVTITCKASRDVAIAVAWYQEKPGKVPKLLIYWASVR | 2245 |
| | HTGVPSRFSGSGSRTDFTLTISSLQPEDVADYFCYQYSSYPFTFGSGTKLEIKRT | |
| | VAAPSVFIAPPSDEQLKSGTASVVCLLNNFYPREAKVQWKVDNALQSGNSQES | |
| | VTEQDSKDSTYSLSSTLTLSKADYEKHKVYACEVTHQGLSSPVTKSFNRGEC | |
| IL23 Variable light | DIQMTQSPSSLSASVGDRVTITCKASRDVAIAVAWYQEKPGKVPKLLIYWASVR | 2234 |
| (vl) domain | HTGVPSRFSGSGSRTDFTLTISSLQPEDVADYFCYQYSSYPFTFGSGTKLEIK | |
| VlCDR1 | KASRDVAIAVA | 184 |
| VlCDR2 | WASVRHT | 1249 |
| VlCDR3 | YQYSSYPFT | 1250 |
| Heavy Chain 1 | QVQLVQSGAEVKKPGASVKVSCKVSGFSVTSYNVHWVREAPGQGLEWMGV | 2240 |
| | MWYGGNTDYNSKFQGRVTMTRDTSTNTVYMELSSLRSEDTAVYYCARAGRY | |
| | YVDSNYYWDFPYWGQGTLVTVSSASTKGPSVFPLAPSSKSTSGGTAALGCLV | |
| | KDYFPEPVTVSWNSGALTSGVHTFPAVLQSSGLYSLSSVVTVPSSSLGTQTYIC | |
| | NVNHKPSDTKVDEKVEPDSCDKTHTCPPCPAPPVAGPSVFLFPPKPKDTLMISR | |
| | TPEVTCVVVDVKHEDPEVKFNWYVDGVEVHNAKTKPREEEYNSTYRVVSVL | |
| | TVLHQDWLNGKEYKCKVSNKALPAPIEKTISKAKGQPREPQVYTLPPSREEMT | |
| | KNQVSLTCDVSGFYPSDIAVEWESDGQPENNYKTTPPVLDSDGSFFLYSKLTVD | |
| | KSRWEQGDVFSCSVLHEALHSHYTQKSLSLSPGK | |
| TL1A Variable | QVQLVQSGAEVKKPGASVKVSCKVSGFSVTSYNVHWVREAPGQGLEWMGV | 2241 |
| heavy (vh) domain | MWYGGNTDYNSKFQGRVTMTRDTSTNTVYMELSSLRSEDTAVYYCARAGRY | |
| | YVDSNYYWDFPYWGQGTLVTVSS | |
| vhCDR1 | SYNVH | 102 |
| vhCDR2 | VMWYGGNTDYNSKFQG | 1924 |
| vhCDR3 | AGRYYVDSNYYWDFPY | 1203 |
| Light Chain 1 | DIQMTQSPSSVSASVGDRVTITCRASEDIYSGLAWYQKKPGKSPKLLIYGASSL | 2242 |
| | QDGVPSRFSGSGSGTDYTLTISSLQPEDFATYFCQEGLKSPYTFGQGTKLEIKRT | |
| | VAAPSVFIFPPSKKQLKSGTASVVCLLNNFYPREAKVQWKVDNALQSGNSQES | |
| | VTEQDSKDSTYSLSSTLTLSKADYEKHKVYACEVTHQGLSSPVTKSFNRGEC | |
| TL1A Variable light | DIQMTQSPSSVSASVGDRVTITCRASEDIYSGLAWYQKKPGKSPKLLIYGASSL | 2243 |
| (vl) domain | QDGVPSRFSGSGSGTDYTLTISSLQPEDFATYFCQEGLKSPYTFGQGTKLEIK | |
| VlCDR1 | RASEDIYSGLA | 106 |
| VlCDR2 | GASSLQD | 107 |
| VlCDR3 | QEGLKSPYT | 108 |
| Heavy Chain 2 | QVQLVQSGAEVKKPGSSVKVSCKASGYTFTDQTIHWMRKAPGQGLEWIGYIY | 2250 |
| | PRDDSPKYNENFKGKVTITADKSTSTAYMELSSLRSEDTAVYYCAIPDRSGYAF | |
| | FIYWGQGTLVTVSSASTKGPSVFPLAPSSKSTSGGTAFLGCLVKDYFPEPVTVS | |
| | WNSGALTSGVHTFPAVLQSSGLYSLSSVVTVPSSSLGTQTYICNVNHKPSNTKV | |
| | DKKVEPKSCDKTHTCPPCPAPPVAGPSVFLFPPKPKDTLMISRTPEVTCVVVDV | |
| | KHEDPEVKFNWYVDGVEVHNAKTKPREEQYNSTYRVVSVLTVLHQDWLNG | |
| | KEYKCKVSNKALPAPIEKTISKAKGQPREPQVYTLPPSREQMTKNQVKLTCLV | |
| | KGFYPSDIAVEWESNGQPENNYKTTPPVLDSDGSFFLYSKLTVDKSRWQQGNV | |
| | FSCSVLHEALHSHYTQKSLSLSPGK | |
| IL23 Variable heavy | QVQLVQSGAEVKKPGSSVKVSCKASGYTFTDQTIHWMRKAPGQGLEWIGYIY | 2235 |
| (vh) domain | PRDDSPKYNENFKGKVTITADKSTSTAYMELSSLRSEDTAVYYCAIPDRSGYAF | |
| | FIYWGQGTLVTVSS | |
| vhCDR1 | DQTIH | 180 |
| vhCDR2 | YIYPRDDSPKYNENFKG | 181 |
| vhCDR3 | PDRSGYAFFIY | 2236 |
| Light Chain 2 | DIQMTQSPSSLSASVGDRVTITCKASRDVAIAVAWYQEKPGKVPKLLIYWASQR | 2251 |
| | HTGVPSRFSGSGSRTDFTLTISSLQPEDVADYFCYQYSSYPFTFGSGTKLEIKRT | |
| | VAAPSVFIAPPSDEQLKSGTASVVCLLNNFYPREAKVQWKVDNALQSGNSQES | |
| | VTEQDSKDSTYSLSSTLTLSKADYEKHKVYACEVTHQGLSSPVTKSFNRGEC | |
| IL23 Variable light | DIQMTQSPSSLSASVGDRVTITCKASRDVAIAVAWYQEKPGKVPKLLIYWASQR | 2237 |
| (vl) domain | HTGVPSRFSGSGSRTDFTLTISSLQPEDVADYFCYQYSSYPFTFGSGTKLEIK | |
| VlCDR1 | KASRDVAIAVA | 184 |
| VlCDR2 | WASQRHT | 2238 |
| VlCDR3 | YQYSSYPFT | 1250 |
| Heavy Chain 1 | QVQLVQSGAEVKKPGASVKVSCKVSGFSVTRYNVHWVREAPGQGLEWMGV | 2252 |
| | MWSGANTDYNSKFQGRVTMTRDTSTNTVYMELSSLRSEDTAVYYCARAGRY | |
| | YVDSNYYWDFPYWGQGTLVTVSSASTKGPSVFPLAPSSKSTSGGTAALGCLV | |
| | KDYFPEPVTVSWNSGALTSGVHTFPAVLQSSGLYSLSSVVTVPSSSLGTQTYIC | |
| | NVNHKPSDTKVDEKVEPDSCDKTHTCPPCPAPPVAGPSVFLFPPKPKDTLMISR | |
| | TPEVTCVVVDVKHEDPEVKFNWYVDGVEVHNAKTKPREEEYNSTYRVVSVL | |
| | TVLHQDWLNGKEYKCKVSNKALPAPIEKTISKAKGQPREPQVYTLPPSREEMT | |
| | KNQVSLTCDVSGFYPSDIAVEWESDGQPENNYKTTPPVLDSDGSFFLYSKLTVD | |
| | KSRWEQGDVFSCSVLHEALHSHYTQKSLSLSPGK | |
| TL1A Variable | QVQLVQSGAEVKKPGASVKVSCKVSGFSVTRYNVHWVREAPGQGLEWMGV | 2253 |
| heavy (vh) domain | MWSGANTDYNSKFQGRVTMTRDTSTNTVYMELSSLRSEDTAVYYCARAGRY | |
| | YVDSNYYWDFPYWGQGTLVTVSS | |
| vhCDR1 | RYNVH | 1201 |
| vhCDR2 | VMWSGANTDYNSKFQG | 1202 |
| vhCDR3 | AGRYYVDSNYYWDFPY | 1203 |
| Light Chain 1 | DIQMTQSPSSVSASVGDRVTITCRASEDIYSGLAWYQKKPGKSPKLLIYGASSL | 2242 |
| | QDGVPSRFSGSGSGTDYTLTISSLQPEDFATYFCQEGLKSPYTFGQGTKLEIKRT | |
| | VAAPSVFIFPPSKKQLKSGTASVVCLLNNFYPREAKVQWKVDNALQSGNSQES | |
| | VTEQDSKDSTYSLSSTLTLSKADYEKHKVYACEVTHQGLSSPVTKSFNRGEC | |
| TL1A Variable light | DIQMTQSPSSVSASVGDRVTITCRASEDIYSGLAWYQKKPGKSPKLLIYGASSL | 2243 |
| (vl) domain | QDGVPSRFSGSGSGTDYTLTISSLQPEDFATYFCQEGLKSPYTFGQGTKLEIK | |
| VlCDR1 | RASEDIYSGLA | 106 |
| VlCDR2 | GASSLQD | 107 |
| VlCDR3 | QEGLKSPYT | 108 |
| Heavy Chain 2 | QVQLVQSGAEVKKPGSSVKVSCKASGYTFTDQTIHWMRKAPGQGLEWIGYIY | 2244 |
| | PRDDSPKYNENFKGKVTITADKSTSTAYMELSSLRSEDTAVYYCAIPDRSGYAW | |
| | FIYWGQGTLVTVSSASTKGPSVFPLAPSSKSTSGGTAFLGCLVKDYFPEPVTVS | |
| | WNSGALTSGVHTFPAVLQSSGLYSLSSVVTVPSSSLGTQTYICNVNHKPSNTKV | |
| | DKKVEPKSCDKTHTCPPCPAPPVAGPSVFLFPPKPKDTLMISRTPEVTCVVVDV | |
| | KHEDPEVKFNWYVDGVEVHNAKTKPREEQYNSTYRVVSVLTVLHQDWLNG | |
| | KEYKCKVSNKALPAPIEKTISKAKGQPREPQVYTLPPSREQMTKNQVKLTCLV | |
| | KGFYPSDIAVEWESNGQPENNYKTTPPVLDSDGSFFLYSKLTVDKSRWQQGNV | |
| | FSCSVLHEALHSHYTQKSLSLSPGK | |
| IL23 Variable heavy | QVQLVQSGAEVKKPGSSVKVSCKASGYTFTDQTIHWMRKAPGQGLEWIGYIY | 2233 |
| (vh) domain | PRDDSPKYNENFKGKVTITADKSTSTAYMELSSLRSEDTAVYYCAIPDRSGYAW | |
| | FIYWGQGTLVTVSS | |
| vhCDR1 | DQTIH | 180 |
| vhCDR2 | YIYPRDDSPKYNENFKG | 181 |
| vhCDR3 | PDRSGYAWFIY | 182 |
| Light Chain 2 | DIQMTQSPSSLSASVGDRVTITCKASRDVAIAVAWYQEKPGKVPKLLIYWASVR | 2245 |
| | HTGVPSRFSGSGSRTDFTLTISSLQPEDVADYFCYQYSSYPFTFGSGTKLEIKRT | |
| | VAAPSVFIAPPSDEQLKSGTASVVCLLNNFYPREAKVQWKVDNALQSGNSQES | |
| | VTEQDSKDSTYSLSSTLTLSKADYEKHKVYACEVTHQGLSSPVTKSFNRGEC | |
| IL23 Variable light | DIQMTQSPSSLSASVGDRVTITCKASRDVAIAVAWYQEKPGKVPKLLIYWASVR | 2234 |
| (vl) domain | HTGVPSRFSGSGSRTDFTLTISSLQPEDVADYFCYQYSSYPFTFGSGTKLEIK | |
| VlCDR1 | KASRDVAIAVA | 184 |
| VlCDR2 | WASVRHT | 1249 |
| VlCDR3 | YQYSSYPFT | 1250 |
| Heavy Chain 1 | QVQLVQSGAEVKKPGASVKVSCKVSGFPVTSYNVHWVREAPGQGLEWMGV | 2258 |
| | MWYGGNTDYNSKFQGRVTMTRDTSTNTVYMELSSLRSEDTAVYYCARAGRY | |
| | YHDSNYYWDFPYWGQGTLVTVSSASTKGPSVFPLAPSSKSTSGGTAALGCLV | |
| | KDYFPEPVTVSWNSGALTSGVHTFPAVLQSSGLYSLSSVVTVPSSSLGTQTYIC | |
| | NVNHKPSDTKVDEKVEPDSCDKTHTCPPCPAPPVAGPSVFLFPPKPKDTLMISR | |
| | TPEVTCVVVDVKHEDPEVKFNWYVDGVEVHNAKTKPREEEYNSTYRVVSVL | |
| | TVLHQDWLNGKEYKCKVSNKALPAPIEKTISKAKGQPREPQVYTLPPSREEMT | |
| | KNQVSLTCDVSGFYPSDIAVEWESDGQPENNYKTTPPVLDSDGSFFLYSKLTVD | |
| | KSRWEQGDVFSCSVLHEALHSHYTQKSLSLSPGK | |
| TL1A Variable | QVQLVQSGAEVKKPGASVKVSCKVSGFPVTSYNVHWVREAPGQGLEWMGV | 2259 |
| heavy (vh) domain | MWYGGNTDYNSKFQGRVTMTRDTSTNTVYMELSSLRSEDTAVYYCARAGRY | |
| | YHDSNYYWDFPYWGQGTLVTVSS | |
| vhCDR1 | SYNVH | 102 |
| vhCDR2 | VMWYGGNTDYNSKFQG | 1924 |
| vhCDR3 | AGRYYHDSNYYWDFPY | 104 |
| Light Chain 1 | DIQMTQSPSSVSASVGDRVTITCRASEDIYSGLAWYQKKPGKSPKLLIYGASSL | 2242 |
| | QDGVPSRFSGSGSGTDYTLTISSLQPEDFATYFCQEGLKSPYTFGQGTKLEIKRT | |
| | VAAPSVFIFPPSKKQLKSGTASVVCLLNNFYPREAKVQWKVDNALQSGNSQES | |
| | VTEQDSKDSTYSLSSTLTLSKADYEKHKVYACEVTHQGLSSPVTKSFNRGEC | |
| TL1A Variable light | DIQMTQSPSSVSASVGDRVTITCRASEDIYSGLAWYQKKPGKSPKLLIYGASSL | 2243 |
| (vl) domain | QDGVPSRFSGSGSGTDYTLTISSLQPEDFATYFCQEGLKSPYTFGQGTKLEIK | |
| VlCDR1 | RASEDIYSGLA | 106 |
| VlCDR2 | GASSLQD | 107 |
| VlCDR3 | QEGLKSPYT | 108 |
| Heavy Chain 2 | QVQLVQSGAEVKKPGSSVKVSCKASGYTFTDQTIHWMRKAPGQGLEWIGYIY | 2244 |
| | PRDDSPKYNENFKGKVTITADKSTSTAYMELSSLRSEDTAVYYCAIPDRSGYAW | |
| | FIYWGQGTLVTVSSASTKGPSVFPLAPSSKSTSGGTAFLGCLVKDYFPEPVTVS | |
| | WNSGALTSGVHTFPAVLQSSGLYSLSSVVTVPSSSLGTQTYICNVNHKPSNTKV | |
| | DKKVEPKSCDKTHTCPPCPAPPVAGPSVFLFPPKPKDTLMISRTPEVTCVVVDV | |
| | KHEDPEVKFNWYVDGVEVHNAKTKPREEQYNSTYRVVSVLTVLHQDWLNG | |
| | KEYKCKVSNKALPAPIEKTISKAKGQPREPQVYTLPPSREQMTKNQVKLTCLV | |
| | KGFYPSDIAVEWESNGQPENNYKTTPPVLDSDGSFFLYSKLTVDKSRWQQGNV | |
| | FSCSVLHEALHSHYTQKSLSLSPGK | |
| IL23 Variable heavy | QVQLVQSGAEVKKPGSSVKVSCKASGYTFTDQTIHWMRKAPGQGLEWIGYIY | 2233 |
| (vh) domain | PRDDSPKYNENFKGKVTITADKSTSTAYMELSSLRSEDTAVYYCAIPDRSGYAW | |
| | FIYWGQGTLVTVSS | |
| vhCDR1 | DQTIH | 180 |
| vhCDR2 | YIYPRDDSPKYNENFKG | 181 |
| vhCDR3 | PDRSGYAWFIY | 182 |
| Light Chain 2 | DIQMTQSPSSLSASVGDRVTITCKASRDVAIAVAWYQEKPGKVPKLLIYWASVR | 2245 |
| | HTGVPSRFSGSGSRTDFTLTISSLQPEDVADYFCYQYSSYPFTFGSGTKLEIKRT | |
| | VAAPSVFIAPPSDEQLKSGTASVVCLLNNFYPREAKVQWKVDNALQSGNSQES | |
| | VTEQDSKDSTYSLSSTLTLSKADYEKHKVYACEVTHQGLSSPVTKSFNRGEC | |
| IL23 Variable light | DIQMTQSPSSLSASVGDRVTITCKASRDVAIAVAWYQEKPGKVPKLLIYWASVR | 2234 |
| (vl) domain | HTGVPSRFSGSGSRTDFTLTISSLQPEDVADYFCYQYSSYPFTFGSGTKLEIK | |
| VlCDR1 | KASRDVAIAVA | 184 |
| VlCDR2 | WASVRHT | 1249 |
| VlCDR3 | YQYSSYPFT | 1250 |
| Heavy Chain 1 | DIQMTQSPSSVSASVGDRVTITCRASEDIYSGLAWYQQKPGKSPKLLIYGASSL | 2264 |
| | QDGVPSRFSGSGSGTDYTLTISSLQPEDFATYFCQEGLKSPYTFGQGTKLEIKSS | |
| | ASTKGPSVFPLAPSSKSTSGGTAALGCLVKDYFPEPVTVSWNSGALTSGVHTFP | |
| | AVLQSSGLYSLSSVVTVPSSSLGTQTYICNVNHKPSDTKVDKKVEPKSCDKTH | |
| | TCPPCPAPPVAGPSVFLFPPKPKDTLMISRTPEVTCVVVDVKHEDPEVKFNWYV | |
| | DGVEVHNAKTKPREEEYNSTYRVVSVLTVLHQDWLNGKEYKCKVSNKALPA | |
| | PIEKTISKAKGQPREPQVYTLPPSREEMTKNQVSLTCDVSGFYPSDIAVEWESD | |
| | GQPENNYKTTPPVLDSDGSFFLYSKLTVDKSRWEQGDVFSCSVLHEALHSHYT | |
| | QKSLSLSPGK | |
| TL1A Variable light | DIQMTQSPSSVSASVGDRVTITCRASEDIYSGLAWYQQKPGKSPKLLIYGASSL | 1204 |
| (vl) domain | QDGVPSRFSGSGSGTDYTLTISSLQPEDFATYFCQEGLKSPYTFGQGTKLEIK | |
| vhCDR1 | RASEDIYSGLA | 106 |
| vhCDR2 | GASSLQD | 107 |
| vhCDR3 | QEGLKSPYT | 108 |
| Light Chain 1 | QVQLVQSGAEVKKPGASVKVSCKVSGFSVTSYNVHWVRQAPGQGLEWMGV | 2265 |
| | MWYGGNTDYNSKFQGRVTMTRDTSTNTVYMELSSLRSEDTAVYYCARAGRY | |
| | YVDSNYYWDFPYWGQGTLVTVSSASVAAPSVFIFPPSDEQLKSGTASVVCLLN | |
| | NFYPREAKVQWKVDNALQSGNSQESVTEQDSKDSTYSLSSTLTLSKADYEKH | |
| | KVYACEVTHQGLSSPVTKSFNRGEC | |
| TL1A Variable | QVQLVQSGAEVKKPGASVKVSCKVSGFSVTSYNVHWVRQAPGQGLEWMGV | 1674 |
| heavy (vh) domain | MWYGGNTDYNSKFQGRVTMTRDTSTNTVYMELSSLRSEDTAVYYCARAGRY | |
| | YVDSNYYWDFPYWGQGTLVTVSS | |
| VlCDR1 | SYNVH | 102 |
| VlCDR2 | VMWYGGNTDYNSKFQG | 1924 |
| VlCDR3 | AGRYYVDSNYYWDFPY | 1203 |
| Heavy Chain 2 | QVQLVQSGAEVKKPGSSVKVSCKASGYTFTDQTIHWMRQAPGQGLEWIGYIY | 2266 |
| | PRDDSPKYNENFKGKVTITADKSTSTAYMELSSLRSEDTAVYYCAIPDRSGYAW | |
| | FIYWGQGTLVTVSSASTKGPSVFPLAPSSKSTSGGTAALGCLVKDYFPEPVTVS | |
| | WNSGALTSGVHTFPAVLQSSGLYSLSSVVTVPSSSLGTQTYICNVNHKPSNTKV | |
| | DEKVEPDSCDKTHTCPPCPAPPVAGPSVFLFPPKPKDTLMISRTPEVTCVVVDV | |
| | KHEDPEVKFNWYVDGVEVHNAKTKPREEQYNSTYRVVSVLTVLHQDWLNG | |
| | KEYKCKVSNKALPAPIEKTISKAKGQPREPQVYTLPPSREQMTKNQVKLTCLV | |
| | KGFYPSDIAVEWESNGQPENNYKTTPPVLDSDGSFFLYSKLTVDKSRWQQGNV | |
| | FSCSVLHEALHSHYTQKSLSLSPGK | |
| IL23 Variable heavy | QVQLVQSGAEVKKPGSSVKVSCKASGYTFTDQTIHWMRQAPGQGLEWIGYIY | 179 |
| (vh) domain | PRDDSPKYNENFKGKVTITADKSTSTAYMELSSLRSEDTAVYYCAIPDRSGYAW | |
| | FIYWGQGTLVTVSS | |
| vhCDR1 | DQTIH | 180 |
| vhCDR2 | YIYPRDDSPKYNENFKG | 181 |
| vhCDR3 | PDRSGYAWFIY | 182 |
| Light Chain 2 | DIQMTQSPSSLSASVGDRVTITCKASRDVAIAVAWYQQKPGKVPKLLIYWASVR | 2267 |
| | HTGVPSRFSGSGSRTDFTLTISSLQPEDVADYFCYQYSSYPFTFGSGTKLEIKRT | |
| | VAAPSVFIFPPSKKQLKSGTASVVCLLNNFYPREAKVQWKVDNALQSGNSQES | |
| | VTEQDSKDSTYSLSSTLTLSKADYEKHKVYACEVTHQGLSSPVTKSFNRGEC | |
| IL23 Variable light | DIQMTQSPSSLSASVGDRVTITCKASRDVAIAVAWYQQKPGKVPKLLIYWASVR | 1248 |
| (vl) domain | HTGVPSRFSGSGSRTDFTLTISSLQPEDVADYFCYQYSSYPFTFGSGTKLEIK | |
| VlCDR1 | KASRDVAIAVA | 184 |
| VlCDR2 | WASVRHT | 1249 |
| VlCDR3 | YQYSSYPFT | 1250 |
| Heavy Chain 1 | DIQMTQSPSSVSASVGDRVTITCRASEDIYSGLAWYQQKPGKSPKLLIYGASSL | 2264 |
| | QDGVPSRFSGSGSGTDYTLTISSLQPEDFATYFCQEGLKSPYTFGQGTKLEIKSS | |
| | ASTKGPSVFPLAPSSKSTSGGTAALGCLVKDYFPEPVTVSWNSGALTSGVHTFP | |
| | AVLQSSGLYSLSSVVTVPSSSLGTQTYICNVNHKPSDTKVDKKVEPKSCDKTH | |
| | TCPPCPAPPVAGPSVFLFPPKPKDTLMISRTPEVTCVVVDVKHEDPEVKFNWYV | |
| | DGVEVHNAKTKPREEEYNSTYRVVSVLTVLHQDWLNGKEYKCKVSNKALPA | |
| | PIEKTISKAKGQPREPQVYTLPPSREEMTKNQVSLTCDVSGFYPSDIAVEWESD | |
| | GQPENNYKTTPPVLDSDGSFFLYSKLTVDKSRWEQGDVFSCSVLHEALHSHYT | |
| | QKSLSLSPGK | |
| TL1A Variable light | DIQMTQSPSSVSASVGDRVTITCRASEDIYSGLAWYQQKPGKSPKLLIYGASSL | 1204 |
| (vl) domain | QDGVPSRFSGSGSGTDYTLTISSLQPEDFATYFCQEGLKSPYTFGQGTKLEIK | |
| vhCDR1 | RASEDIYSGLA | 106 |
| vhCDR2 | GASSLQD | 107 |
| vhCDR3 | QEGLKSPYT | 108 |
| Light Chain 1 | QVQLVQSGAEVKKPGASVKVSCKVSGFSVTRYNVHWVRQAPGQGLEWMGV | 2269 |
| | MWSGANTDYNSKFQGRVTMTRDTSTNTVYMELSSLRSEDTAVYYCARAGRY | |
| | YVDSNYYWDFPYWGQGTLVTVSSASVAAPSVFIFPPSDEQLKSGTASVVCLLN | |
| | NFYPREAKVQWKVDNALQSGNSQESVTEQDSKDSTYSLSSTLTLSKADYEKH | |
| | KVYACEVTHQGLSSPVTKSFNRGEC | |
| TL1A Variable | QVQLVQSGAEVKKPGASVKVSCKVSGFSVTRYNVHWVRQAPGQGLEWMGV | 1200 |
| heavy (vh) domain | MWSGANTDYNSKFQGRVTMTRDTSTNTVYMELSSLRSEDTAVYYCARAGRY | |
| | YVDSNYYWDFPYWGQGTLVTVSS | |
| VlCDR1 | RYNVH | 1201 |
| VlCDR2 | VMWSGANTDYNSKFQG | 1202 |
| VlCDR3 | AGRYYVDSNYYWDFPY | 1203 |
| Heavy Chain 2 | QVQLVQSGAEVKKPGSSVKVSCKASGYTFTDQTIHWMRQAPGQGLEWIGYIY | 2266 |
| | PRDDSPKYNENFKGKVTITADKSTSTAYMELSSLRSEDTAVYYCAIPDRSGYAW | |
| | FIYWGQGTLVTVSSASTKGPSVFPLAPSSKSTSGGTAALGCLVKDYFPEPVTVS | |
| | WNSGALTSGVHTFPAVLQSSGLYSLSSVVTVPSSSLGTQTYICNVNHKPSNTKV | |
| | DEKVEPDSCDKTHTCPPCPAPPVAGPSVFLFPPKPKDTLMISRTPEVTCVVVDV | |
| | KHEDPEVKFNWYVDGVEVHNAKTKPREEQYNSTYRVVSVLTVLHQDWLNG | |
| | KEYKCKVSNKALPAPIEKTISKAKGQPREPQVYTLPPSREQMTKNQVKLTCLV | |
| | KGFYPSDIAVEWESNGQPENNYKTTPPVLDSDGSFFLYSKLTVDKSRWQQGNV | |
| | FSCSVLHEALHSHYTQKSLSLSPGK | |
| IL23 Variable heavy | QVQLVQSGAEVKKPGSSVKVSCKASGYTFTDQTIHWMRQAPGQGLEWIGYIY | 179 |
| (vh) domain | PRDDSPKYNENFKGKVTITADKSTSTAYMELSSLRSEDTAVYYCAIPDRSGYAW | |
| | FIYWGQGTLVTVSS | |
| vhCDR1 | DQTIH | 180 |
| vhCDR2 | YIYPRDDSPKYNENFKG | 181 |
| vhCDR3 | PDRSGYAWFIY | 182 |
| Light Chain 2 | DIQMTQSPSSLSASVGDRVTITCKASRDVAIAVAWYQQKPGKVPKLLIYWASVR | 2267 |
| | HTGVPSRFSGSGSRTDFTLTISSLQPEDVADYFCYQYSSYPFTFGSGTKLEIKRT | |
| | VAAPSVFIFPPSKKQLKSGTASVVCLLNNFYPREAKVQWKVDNALQSGNSQES | |
| | VTEQDSKDSTYSLSSTLTLSKADYEKHKVYACEVTHQGLSSPVTKSFNRGEC | |
| IL23 Variable light | DIQMTQSPSSLSASVGDRVTITCKASRDVAIAVAWYQQKPGKVPKLLIYWASVR | 1248 |
| (vl) domain | HTGVPSRFSGSGSRTDFTLTISSLQPEDVADYFCYQYSSYPFTFGSGTKLEIK | |
| VlCDR1 | KASRDVAIAVA | 184 |
| VlCDR2 | WASVRHT | 1249 |
| VlCDR3 | YQYSSYPFT | 1250 |

[0598] Further, in initial production of XENP49749 (OrthoFab) and XENP51595 (CrossMab) with the same DNA ratio (HC1:HC2:LC1:LC2 1:1:1:2), it was found that XENP51595 resulted in ~45% contaminating products (e.g., correct heavy chain pairing, incorrect light chain pairing) in comparison to XENP49749 which resulted in ~21% contaminating products.

### Example 7: Further Characterization of Exemplary TL1A×IL23 Bispecific Antibodies

[0599] The affinity-enhanced binding domains engineered as described in Example 5 were incorporated into TL1A×IL23 bispecific antibodies and further characterized as follows.

### 7A: TL1A and IL23 Binding Affinities

[0600] TL1A and IL23 binding affinities were generated under improved assay conditions to provide more accurate and reliable determinations than earlier preliminary data generated for early screening purposes. Data are depicted in Tables 45 and 46. Table 45 depicts binding kinetics as measured by Biacore at 37° C. for exemplary TL1A×IL23 bispecific antibodies with respect to TL1A, generated under improved assay conditions to provide more accurate and reliable determinations than earlier preliminary data. Table 46 depicts binding kinetics as measured by Biacore at 37° C. for exemplary TL1A×IL23 bispecific antibodies with respect to IL23, generated under improved assay conditions to provide more accurate and reliable determinations than earlier preliminary data. In the end, 041 variant H1.337_L1.27 and IL23-A variant H1_L1.117 were selected as favorites by virtue of having the tightest binding to their respective antigens. The TL1A binding domains of XENP53412, XENP53415, and XENP53413 were derived from 041 variant H1.337_L1.27, and the IL23 binding domains of XENP53412, XENP53415, XENP53387, XENP53375, and XENP53369 were derived from IL23-A variant H1_L1.117.

TABLE 45

| | | TL1A | | |
|---|---|---|---|---|
| | | average | | |
| | | kinetics | | |
| | | N = 3 | | |
| XENP | Description | K_{D} (M) | kₐ (1/Ms) | k_{d} (1/s) |
| XENP53369 | TL1a (041 H1.324_L1.27 orthoFab) × IL23 (IL23-A | 4.27E−11 | 6.09E+05 | 2.60E−05 |
| | H1_L1.117 orthoFab), 1 + 1 orthoFab, Xtend FcKO | | | |
| XENP53375 | TL1a (041 H1.447_L1.27 orthoFab) × IL23 (IL23-A | 6.22E−11 | 9.92E+05 | 6.17E−05 |
| | H1_L1.117 orthoFab), 1 + 1 orthoFab, Xtend FcKO | | | |
| XENP53412 | TL1a (041 H1.337_L1.27 orthoFab) × IL23 (IL23-A | 2.61E−11 | 5.86E+05 | 1.53E−05 |
| | H1_L1.117 orthoFab), 1 + 1 orthoFab, Xtend FcKO | | | |
| XENP53413 | TL1a (041 H1.337_L1.27 orthoFab) × IL23 (IL23-A | 2.56E−11 | 5.75E+05 | 1.47E−05 |
| | H1.187_L1.116 orthoFab), 1 + 1 orthoFab, Xtend | | | |
| | FcKO | | | |
| XENP53387 | TL1a (041 L1.27-Fc H1.447-Ck) × IL23 (IL23-A | 6.22E−11 | 9.63E+05 | 5.98E−05 |
| | H1_K213E/K218D_L1.117_D122K/E123K_Fab), | | | |
| | 1 + 1 CrossMab-VH-VL, FcKO Xtend | | | |
| XENP53415 | TL1a (041 L1.27-Fc H1.337-Ck) × IL23 (IL23-A | 2.55E−11 | 6.13E+05 | 1.56E−05 |
| | H1_K213E/K218D_L1.117_D122K/E123K_Fab), | | | |
| | 1 + 1 CrossMab-VH-VL, FcKO Xtend | | | |
| XENP49335 | TL1a (041 H1L1 Fab) × IL23 (IL23-A H1L1 scFv), | 2.05E−10 | 1.09E+06 | 2.23E−04 |
| | 1 + 1 Fab-scFv-Fc, Xtend FcKO | | | |

TABLE 46

| | | IL23 average | | |
|---|---|---|---|---|
| | | kinetics | | |
| | | N = 3 | | |
| XENP | Description | K_{D} (M) | kₐ (1/Ms) | k_{d} (1/s) |
| XENP53369 | TL1a (041 H1.324_L1.27 orthoFab) × IL23 (IL23-A | 5.47E−11 | 4.58E+05 | 2.44E−05 |
| | H1_L1.117 orthoFab), 1 + 1 orthoFab, Xtend FcKO | | | |
| XENP53375 | TL1a (041 H1.447_L1.27 orthoFab) × IL23 (IL23-A | 2.68E−11 | 8.35E+05 | 2.19E−05 |
| | H1_L1.117 orthoFab), 1 + 1 orthoFab, Xtend FcKO | | | |
| XENP53412 | TL1a (041 H1.337_L1.27 orthoFab) × IL23 (IL23-A | 5.67E−11 | 4.33E+05 | 2.40E−05 |
| | H1_L1.117 orthoFab), 1 + 1 orthoFab, Xtend FcKO | | | |
| XENP53413 | TL1a (041 H1.337_L1.27 orthoFab) × IL23 (IL23-A | 1.02E−10 | 4.00E+05 | 3.99E−05 |
| | H1.187_L1.116 orthoFab), 1 + 1 orthoFab, Xtend | | | |
| | FcKO | | | |
| XENP53387 | TL1a (041 L1.27-Fc H1.447-Ck) × IL23 (IL23-A | 2.47E−11 | 8.20E+05 | 1.99E−05 |
| | H1_K213E/K218D_L1.117_D122K/E123K_Fab), | | | |
| | 1 + 1 CrossMab-VH-VL, FcKO Xtend | | | |
| XENP53415 | TL1a (041 L1.27-Fc H1.337-Ck) × IL23 (IL23-A | 5.42E−11 | 4.43E+05 | 2.32E−05 |
| | H1_K213E/K218D_L1.117_D122K/E123K_Fab), | | | |
| | 1 + 1 CrossMab-VH-VL, FcKO Xtend | | | |
| XENP49699 | IL23 (IL23-A H1L1) × TL1a (041 | 7.45E−11 | 9.25E+05 | 6.77E−05 |
| | H1_G44C_L1_A100C_scFv(GKPGS)4), 1 + 1 Fab- | | | |
| | scFv-Fc, FcKO Xtend | | | |

### 7B: TL1A and IL23 Inhibitory Activity

[0601] TL1A and TL23 inhibitory activity were investigated as described above, data for which are depicted in FIGS. 14 and 15. Inhibitory activity of an individual Fab binding domain within a bispecific modality would generally be expected to be ~50% less than a bivalent antibody variant in standard IgG format since binding reflects monovalent versus bivalent neutralization ability. However, as further shown in FIG. 9, the TL1A×IL23 bsAb XENP53387 antibody showed activity comparable to various bivalent TL1A and IL23 control comparator mAbs using an IL23 luciferase reporter assay as an indicator of IL23 activity and using a caspase 3/7 luminescence assay as an indicator of TL1A-induced apoptosis and TL1A activity (Tables 47-50). As shown in FIGS. 14 and 15, XENP53369, XENP53375, XENP53412, XENP53413, and XENP53415 had comparable activity to XENP53387. Table 47 depicts bispecific sequences utilizing TL1A and RSV or IL23 and RSV. Table 48 depicts sequences for bivalent TL1A mAbs utilized as controls. Table 49 depicts sequences for bivalent IL23 mAbs utilized as controls. Table 50 depicts sequences for bivalent IL12 mAbs utilized as controls.

TABLE 47

| | SEQ ID NO \| Antigen | | | | | |
|---|---|---|---|---|---|---|
| Xencor ID | Chain 1 | | Chain 2 | | Chain 3 | |
| XENP48697 | 1399 | IL23 | 1400 | RSV | 1401 | IL23 |
| XENP49320 | 1402 | TL1A | 1403 | RSV | 1404 | TL1A |

TABLE 48

SEQ ID NO | Antigen

| Xencor ID | Heavy Chain | | Light Chain | |
|---|---|---|---|---|
| XENP46597 | 1405 | TL1A | 1406 | TL1A |
| XENP46602 | 1407 | TL1A | 1408 | TL1A |
| XENP49724 | 1409 | TL1A | 1410 | TL1A |
| XENP54715 | 1411 | TL1A | 1412 | TL1A |
| XENP54716 | 1413 | TL1A | 1414 | TL1A |
| XENP47772 | 1415 | TL1A | 1416 | TL1A |
| XENP47824 | 1417 | TL1A | 1418 | TL1A |
| XENP47942 | 1419 | TL1A | 1420 | TL1A |

TABLE 49

SEQ ID NO | Antigen

| | | |
|---|---|---|
| Xencor ID | Heavy Chain | Light Chain |

| | | | | |
|---|---|---|---|---|
| XENP47289 | 1421 | IL23 | 1422 | IL23 |
| XENP47292 | 1423 | IL23 | 1424 | IL23 |

TABLE 50

SEQ ID NO | Antigen

| Xencor ID | Heavy Chain | | Light Chain | |
|---|---|---|---|---|
| XENP53676 | 1425 | IL12B | 1426 | IL 12B |

### 7C: In Vivo Pharmacokinetics

[0602] The pharmacokinetic profile of the TL1A×IL23 bispecific antibodies engineered with Fc variants for extended serum half-life were investigated in huFcRn mice. Mice were injected intravenously with 5 mg/kg TL1A×IL23 bispecific antibodies, and serum concentration was assessed over time, data for which are depicted in FIGS. 16 and 17. The data show good half-life for all bispecific antibodies.

### Example 8: Developability of Exemplary TL1A×IL23 Bispecific Antibodies

[0603] As the TL1A×IL23 bispecific antibodies described herein are intended, in part, for treatment of chronic diseases, it is desirable that the antibodies be deliverable by subcutaneous administration and exhibit extended serum half-life.

### 8A: Stability of TL1A×IL23 Bispecific Antibodies

[0604] To ensure suitability for subcutaneous administration, the bispecific antibodies must be stable (high melting temperature) and maintain low viscosity at high concentrations.

[0605] Stability of the bispecific antibodies were assessed using Differential Scanning Calorimetry (DSC), data for which are depicted in Table 51. All of the bispecific antibodies show a similar Tonset/Tm1 (CH2 domain) with all Tm2 being ≥75° C. and in a good thermostable range.

TABLE 51

| XENP | Tonset | Tm1 | Tm2 | Tm3 |
|---|---|---|---|---|
| 53369 | 57.19 | 65.68 | 79.61 | 83.79 |
| 53375 | 57.08 | 65.65 | 79.66 | 83.79 |
| 53387 | 57.88 | 65.87 | 77.62 | 80.66 |
| 53412 | 57.26 | 65.71 | 79.5 | 83.78 |
| 53413 | 58.05 | 65.78 | 79.36 | 82.59 |
| 53415 | 58.15 | 65.87 | 77.81 | 80.86 |
| 49698 | 58.44 | 65.64 | 77.95 | 83.32 |
| 47942 | 58.26 | 65.63 | 75.91 | 84.37 |

[0606] Next, the viscosity of the bispecific antibodies at high concentration (~150 mg/ml) at 20° C. was assessed, data for which are depicted in Table 52. Typically, viscosity over 20 mPa-s is considered high risk. Most of the bispecific antibodies show viscosity below 20 mPa-s.

TABLE 52

| XENP | mg/mL | mPa-s |
|---|---|---|
| 49749 | 156 | 5 |
| 52515 | 168 | 7.8 |
| 52516 | 152 | 8.9 |
| 52517 | 165 | 7.9 |
| 52565 | 176 | 15.4 |
| 52566 | 164 | 14.3 |
| 52877 | 184 | 31.1 |

### 8B: ADA Potential of TL1A×IL23 Bispecific Antibodies

[0607] While the bispecific antibodies were engineered with Fc variants to extend serum half-life and demonstrated favorable pharmacokinetics (PK) in huFcRn mice (see Example 6B), it is critical that they do not elicit anti-drug antibodies (ADA), as ADA responses could neutralize the therapeutic antibody or accelerate its clearance, thereby reducing half-life.

[0608] Pre-existing antibodies are naturally occurring immunoglobulins present prior to administration of a therapeutic drug. To minimize ADA concerns, candidate antibodies may be selected for minimal pre-existing reactivity. The pre-existing reactivity approach described by Bivi et al., 2019 (MAbs 11(5):861-869, doi:10.1080/19420862.2019.1612699) was applied to assess the TL1A×IL23 bispecific antibodies. As depicted in Table 53, each of the TL1A×IL23 bispecific antibodies tested have p90 values ranging from 12 to 21 which is on par with approved products such as pembrolizumab (p90=22) having low clinical ADA prevalence (0.7-2.5%).

TABLE 53

| XENP | p90 |
|---|---|
| 53369 | 20 |
| 53375 | 12 |
| 53387 | 12 |
| 53412 | 17 |
| 53413 | 19 |
| 53415 | 21 |

### Example 9: Evaluation of TL1A×IL23 Bispecific Antibodies in Colitis Model

[0609] The in vivo efficacy of TL1A×IL23 bispecific antibodies is investigated using a TNBS-induced acute colitis model in hTL1A/hIL-23A/hIL12B knock-in mice. At Day 0, colitis is induced in mice by intracolonic administration of 2% TNBS solution (0.1 mL), while sham animals receive 50% ethanol. Test articles (TL1A mAb, IL23 mAb, TL1A mAb+IL23 mAb, or TL1A×IL23 bispecific mAb) or vehicle are administered, and animals are monitored daily for clinical signs, including body weight, stool consistency, and fecal blood. The Disease Activity Index (DAI), comprising weight loss, stool score, and bleeding subscores, is recorded under blinded assessment. It is anticipated that administration of the test articles will result in reduced DAI scores compared to vehicle-treated controls, indicating therapeutic benefit.

[0610] At the study endpoint (Day 5), serum samples are collected for pharmacokinetic assessment, and colons are harvested for gross evaluation, including colon weight, length, and photographic documentation. It is expected that mice receiving the test articles will exhibit reduced colon weight-to-length ratios and attenuated macroscopic colonic damage relative to controls, supporting the conclusion that the test articles have anti-inflammatory activity and therapeutic potential for the treatment of inflammatory bowel disease.

### Example 10: Bivalent TL1A and IL23 mAbs

[0611] Although the foregoing examples describe TL1A×IL23 bispecific antibodies, any of the TL1A binding domains described in Example 1 and IL23 binding domains described in Example 2 may be formatted as bivalent monospecific antibodies and used alone or in combination.

### Means Plus Function Embodiments

### Group 1 “Means” Clauses: Means for Binding TL1A and Means for Binding IL23 Together

### Exemplary Clauses:

[0612] 1. A bispecific antibody comprising: (a) a means for binding TL1A; and (b) a means for binding IL-23.
[0613] 2. A pharmaceutical composition comprising: (a) the bispecific antibody of clause 1; and (b) a pharmaceutically acceptable carrier.
[0614] 3. A pharmaceutical composition comprising: (a) a first composition comprising a means for binding TL1A; and (b) a second composition comprising a means for binding IL-23.
[0615] 4. A pharmaceutical composition comprising: (a) a means for binding TL1A; (b) a means for binding IL23; and (c) a pharmaceutically acceptable carrier.

TABLE 54
below links the above listed Group 1 “means” clauses to the relevant portions of the specification.

| Recited | Exemplified structures and/or materials and/or acts disclosed in the Specification of the |
|---|---|
| function | application filed herewith |
| Means | Table 22: anti-TL1A antibody with HCDRs/LCDRs or VH/VL sequences of |
| for | “041_H1.337_L1.27,” “041_H1.447_L1.27,” “041_H1.324_L1.27,” or “041_H1.239_L1.27.” |
| binding | Table 44: anti-TL1A antibody with HCDRs/LCDRs, VH/VL, or heavy chain/light chain |
| TL1A | sequences of “XENP53412,” “XENP53413,” “XENP53375,” “XENP53369,” “XENP53415,” or |
| | “XENP53387.” |
| | Table 7: anti-TL1A antibody with HCDRs/LCDRs or VH/VL sequences of “041[TL1a]_H1L1.” |
| Means | Table 24: anti-IL23 antibody with HCDRs/LCDRs or VH/VL sequences of “IL23- |
| for | A_H1_L1.117,” “IL23-A_H1.187_L1.116,” or “IL23-A_H1.41_L1.117.” |
| binding | Table 44: anti-IL23 antibody with HCDRs/LCDRs, VH/VL, or heavy chain/light chain |
| IL23 | sequences of “XENP53412,” “XENP53413,” “XENP53375,” “XENP53369,” “XENP53415,” or |
| | “XENP53387.” |

### Group 2 “Means” Clauses: Means for Binding IL23, but TL1A Binding Domain Structurally Defined

### Exemplary Clauses:

[0616] 1. An antibody comprising a TL1A antigen-binding domain comprising a variable heavy domain comprising a vhCDR1, a vhCDR2, and a vhCDR3 contained within a variable heavy domain comprising the amino acid sequence of SEQ ID NO: __, and a variable light domain comprising a vlCDR1, a vlCDR2, and a vlCDR3 contained within a variable light domain comprising the amino acid sequence of SEQ ID NO: __.
[0617] 2. An antibody comprising a TL1A antigen-binding domain comprising a variable heavy domain comprising a vhCDR1 comprising the amino acid sequence of SEQ ID NO: __, a vhCDR2 comprising the amino acid sequence of SEQ ID NO: __, and a vhCDR3 comprising the amino acid sequence of SEQ ID NO: __, and a variable light domain comprising a vlCDR1 comprising the amino acid sequence of SEQ ID NO: __, a vlCDR2 comprising the amino acid sequence of SEQ ID NO: __, and a vlCDR3 comprising the amino acid sequence of SEQ ID NO: __.
[0618] 3. An antibody comprising a TL1A antigen-binding domain comprising a variable heavy domain and a variable light domain, wherein the variable heavy domain comprises the amino acid sequence of SEQ ID NO: __, and wherein the variable light domain comprises the amino acid sequence of SEQ ID NO: __.
[0619] 4. The antibody of clause 1, wherein the antibody is a bispecific antibody.
[0620] 5. The antibody of clause 4, wherein the bispecific antibody further comprises a means for binding IL23.

TABLE 55
below links the above listed Group 2 “means” clauses
to the relevant portions of the specification.

| Recited | Exemplified structures and/or materials and/or acts disclosed in the |
|---|---|
| function | Specification of the application filed herewith |
| Means | Any species of anti-IL23 antibody disclosed herein. |
| for | Species of anti-IL23 antibodies disclosed in WO2007005955, WO2007024846, |
| binding | WO2007027714, WO2007027761, WO2007076524, WO2007147019, WO2008103432, |
| IL23 | WO2008103473, WO2008134659, WO2008153610, WO2009082624, WO2010027766, |
| | WO2010142534, WO2011056600, WO2011159655, WO2012061448, WO2012093127, |
| | WO2013009535, WO2013165791, WO2013177101, WO2014004436, WO2014093203, |
| | WO2014093206, WO2014100312, WO2014137962, WO2014143540, WO2014149425, |
| | WO2015119841, WO2016014775, WO2016036918, WO2016073406, WO2016126638, |
| | WO2016168282, WO2017015433, WO2017048901, WO2017049035, WO2017074428, |
| | WO2017112536, WO2017172771, WO2017180821, WO2018064436, WO2018071504, |
| | WO2018093841, WO2018204156, WO2019027780, WO2019090329, WO2019171252, |
| | WO2019191464, WO2019215701, WO2020007368, WO2020012244, WO2020016838, |
| | WO2020055651, WO2020104943, WO2020108530, WO2020183418, WO2020198493, |
| | WO2020207724, WO2020212874, WO2020215019, WO2020219314, WO2020234834, |
| | WO2020245766, WO2020254826, WO2021035129, WO2021048743, WO2021126435, |
| | WO2021202731, WO2021224823, WO2021228113, WO2021234634, WO2021248718, |
| | WO2021260577, WO2022013745, WO2022056202, WO2022150472, WO2022187196, |
| | WO2022187657, WO2022190033, WO2022190034, WO2022243937, WO2022251623, |
| | WO2023036127, WO2023051798, WO2023051798, WO2023056417, WO2023064278, |
| | WO2023073615, WO2023084488, WO2023095000, WO2023111981, WO2023133538, |
| | WO2023135554, WO2023144699, WO2023187707, WO2023220663, WO2023223265, |
| | WO2023244746, WO2024026395, WO2024061288, WO2024077113, WO2024085697, |
| | WO2024110898, WO2024118630, WO2024178157, WO2024186635, WO2024191771, |
| | WO2024222891, WO2024228134, WO2024228135, WO2024233362, WO2024239006, |
| | WO2024241295, WO2024255867, WO2024263900, WO2025024723, WO2025032102, |
| | WO2025036280, WO2025051249, WO2025071362, WO2025071366, WO2025076414, |
| | WO2025083549, WO2025109545, WO2025111585, WO2025120601, WO2025137347, |
| | WO2025170982, and WO2025171006, each of which is incorporated by reference to the |
| | extent that the disclosure is of an anti-IL23 antibody. |

### Group 3 “Means” Clauses: Means for Binding TL1A, but IL23 Binding Domain Structurally Defined

### Exemplary Clauses:

[0621] 1. An antibody comprising an IL23 antigen-binding domain comprising a variable heavy domain comprising a vhCDR1, a vhCDR2, and a vhCDR3 contained within a variable heavy domain comprising the amino acid sequence of SEQ ID NO: __, and a variable light domain comprising a vlCDR1, a vlCDR2, and a vlCDR3 contained within a variable light domain comprising the amino acid sequence of SEQ ID NO: __.
[0622] 2. An antibody comprising an IL23 antigen-binding domain comprising a variable heavy domain comprising a vhCDR1 comprising the amino acid sequence of SEQ ID NO: __, a vhCDR2 comprising the amino acid sequence of SEQ ID NO: __, and a vhCDR3 comprising the amino acid sequence of SEQ ID NO: __, and a variable light domain comprising a vlCDR1 comprising the amino acid sequence of SEQ ID NO: __, a vlCDR2 comprising the amino acid sequence of SEQ ID NO: __, and a vlCDR3 comprising the amino acid sequence of SEQ ID NO: __.
[0623] 3. An antibody comprising an IL23 antigen-binding domain comprising a variable heavy domain and a variable light domain, wherein the variable heavy domain comprises the amino acid sequence of SEQ ID NO: __, and wherein the variable light domain comprises the amino acid sequence of SEQ ID NO: __.
[0624] 4. The antibody of clause 1, wherein the antibody is a bispecific antibody.
[0625] 5. The antibody of clause 4, wherein the bispecific antibody further comprises a means for binding TL1A.

TABLE 56
below links the above listed Group 3 “means” clauses
to the relevant portions of the specification.

| Recited | Exemplified structures and/or materials and/or acts disclosed in the |
|---|---|
| function | Specification of the application filed herewith |
| Means | Any species of anti-TL1A antibody disclosed herein. |
| for | Species of anti-TLIA antibodies disclosed in WO2005018571, WO2006127900, |
| binding | WO2008106451, WO2009064854, WO2012064682, WO2013044298, WO2014106602, |
| TL1A | WO2014160883, WO2014186665, WO2014186750, WO2015010108, WO2015073580, |
| | WO2017049024, WO2017077715, WO2017106383, WO2017161342, WO2017196663, |
| | WO2017201461, WO2018022628, WO2018081074, WO2019209995, WO2020232125, |
| | WO2021081365, WO2021108694, WO2021202926, WO2021260577, WO2022103961, |
| | WO2022119842, WO2022140283, WO2022178158, WO2022178159, WO2022232253, |
| | WO2023009545, WO2023102051, WO2023133538, WO2023220663, WO2024026386, |
| | WO2024026395, WO2024112618, WO2024118630, WO2024137353, WO2024148218, |
| | WO2024148222, WO2024173838, WO2024173861, WO2024173865, WO2024173877, |
| | WO2024186859, WO2024233362, WO2024239006, WO2024249282, WO2024263868, |
| | WO2024263945, WO2025024723, WO2025038473, WO2025076081, WO2025111585, |
| | WO2025112237, WO2025140188, WO2025144089, WO2025160331, WO2025160334, and |
| | WO2025167705, each of which is incorporated by reference to the extent that the disclosure |
| | is of an anti-TL1A antibody. |

The application's sequence listing, which the Patent Office published only in electronic form, follows.

SEQUENCE LISTING (2379 sequences)

SEQ ID NO: 1 - protein, 189 aa, Homo sapiens
MLGSRAVMLLLLLPWTAQGRAVPGGSSPAWTQCQQLSQKLCTLAWSAHPLVGHMDLREEGDEETTNDVPHIQCGDGCDPQGLRDNSQFCLQRIHQGLIFYEKLLGSDIFTGEPSLLPDSPVGQLHASLLGLSQLLQPEGHHWETQQIPSLSPSQPWQRLLLRFKILRSLQAFVAVAARVFAHGAATLSP

SEQ ID NO: 2 - protein, 196 aa, Mus musculus
MLDCRAVIMLWLLPWVTQGLAVPRSSSPDWAQCQQLSRNLCMLAWNAHAPAGHMNLLREEEDEETKNNVPRIQCEDGCDPQGLKDNSQFCLQRIRQGLAFYKHLLDSDIFKGEPALLPDSPMEQLHTSLLGLSQLLQPEDHPRETQQMPSLSSSQQWQRPLLRSKILRSLQAFLAIAARVFAHGAATLTEPLVPTA

SEQ ID NO: 3 - protein, 189 aa, Macaca fascicularis
MLGSRAVMLLLLLSWTAQGRAVPGGSSPAWAQCQQLSQKLCTLAWSAHPLVGHMDLREEGDEETTNDVPHIQCGDGCDPQGLRDNSQFCLQRIRQGLIFYEKLLGSDIFTGEPSLLPDSPVGQLHASLLGLSQLLQPEGHHWETQQIPSPSPSQPWQRLLLRFKILRSLQAFVAVAARVFAHGAATLSP

SEQ ID NO: 4 - protein, 251 aa, Homo sapiens
MAEDLGLSFGETASVEMLPEHGSCRPKARSSSARWALTCCLVLLPFLAGLTTYLLVSQLRAQGEACVQFQALKGQEFAPSHQQVYAPLRADGDKPRAHLTVVRQTPTQHFKNQFPALHWEHELGLAFTKNRMNYTNKFLLIPESGDYFIYSQVTFRGMTSECSEIRQAGRPNKPDSITVVITKVTDSYPEPTQLLMGTKSVCEVGSNWFQPIYLGAMFSLQEGDKLMVNVSDISLVDYTKEDKTFFGAFLL

SEQ ID NO: 5 - protein, 252 aa, Mus musculus
MAEELGLGFGEGVPVEVLPEGCRHRPEARAGLAARSKACLALTCCLLSFPILAGLSTLLMAGQLRVPGKDCMLRAITEERSEPSPQQVYSPPRGKPRAHLTIKKQTPAPHLKNQLSALHWEHDLGMAFTKNGMKYINKSLVIPESGDYFIYSQITFRGTTSVCGDISRGRRPNKPDSITVVITKVADSYPEPARLLTGSKSVCEISNNWFQSLYLGAMFSLEEGDRLMVNVSDISLVDYTKEDKTFFGAFLL

SEQ ID NO: 6 - protein, 252 aa, Rattus norvegicus
MAEELGLGFGEAVPVEMLPEGCRHRREARTGLAARSKACLALTCCLLSFPILAGLSTLLMTGQLRIPGKDCMFPTVTEERSAPSAQPVYTPSRDKPKAHLTIMRQTPVPHLKNELAALHWENNLGMAFTKNRMNYTNKFLVIPESGDYFIYSQITFRGTTSECGDISRVRRPKKPDSITVVITKVADSYPEPAHLLTGTKSVCEISSNWFQPIYLGAMFSLEEGDRLMVNVSDISLVDYTKEDKTFFGAFLI

SEQ ID NO: 7 - protein, 15 aa, synthetic construct
GGGGSGGGGSGGGGS

SEQ ID NO: 8 - protein, 18 aa, synthetic construct
GSTSGSGKPGSGEGSTKG

SEQ ID NO: 9 - protein, 14 aa, synthetic construct
IRPRAIGGSKPRVA

SEQ ID NO: 10 - protein, 15 aa, synthetic construct
GKGGSGKGGSGKGGS

SEQ ID NO: 11 - protein, 15 aa, synthetic construct
GGKGSGGKGSGGKGS

SEQ ID NO: 12 - protein, 15 aa, synthetic construct
GGGKSGGGKSGGGKS

SEQ ID NO: 13 - protein, 15 aa, synthetic construct
GKGKSGKGKSGKGKS

SEQ ID NO: 14 - protein, 15 aa, synthetic construct
GGGKSGGKGSGKGGS

SEQ ID NO: 15 - protein, 15 aa, synthetic construct
GKPGSGKPGSGKPGS

SEQ ID NO: 16 - protein, 20 aa, synthetic construct
GKPGSGKPGSGKPGSGKPGS

SEQ ID NO: 17 - protein, 20 aa, synthetic construct
GKGKSGKGKSGKGKSGKGKS

SEQ ID NO: 18 - protein, 20 aa, synthetic construct
GGGGSGGGGSGGGGSGGGGS

SEQ ID NO: 19 - protein, 14 aa, synthetic construct
STAGDTHLGGEDFD

SEQ ID NO: 20 - protein, 15 aa, synthetic construct
GEGGSGEGGSGEGGS

SEQ ID NO: 21 - protein, 15 aa, synthetic construct
GGEGSGGEGSGGEGS

SEQ ID NO: 22 - protein, 15 aa, synthetic construct
GGGESGGGESGGGES

SEQ ID NO: 23 - protein, 15 aa, synthetic construct
GEGESGEGESGEGES

SEQ ID NO: 24 - protein, 15 aa, synthetic construct
GGGESGGEGSGEGGS

SEQ ID NO: 25 - protein, 20 aa, synthetic construct
GEGESGEGESGEGESGEGES

SEQ ID NO: 26 - protein, 18 aa, synthetic construct
GSTSGSGKPGSGEGSTKG

SEQ ID NO: 27 - protein, 19 aa, synthetic construct
PRGASKSGSASQTGSAPGS

SEQ ID NO: 28 - protein, 19 aa, synthetic construct
GTAAAGAGAAGGAAAGAAG

SEQ ID NO: 29 - protein, 19 aa, synthetic construct
GTSGSSGSGSGGSGSGGGG

SEQ ID NO: 30 - skipped

SEQ ID NO: 31 - protein, 5 aa, synthetic construct
GGGGS

SEQ ID NO: 32 - protein, 10 aa, synthetic construct
GGGGSGGGGS

SEQ ID NO: 33 - protein, 25 aa, synthetic construct
GGGGSGGGGSGGGGSGGGGSGGGGS

SEQ ID NO: 34 - protein, 30 aa, synthetic construct
GGGGSGGGGSGGGGSGGGGSGGGGSGGGGS

SEQ ID NO: 35 - protein, 35 aa, synthetic construct
GGGGSGGGGSGGGGSGGGGSGGGGSGGGGSGGGGS

SEQ ID NO: 36 - protein, 5 aa, synthetic construct
GGGGA

SEQ ID NO: 37 - protein, 10 aa, synthetic construct
GGGGAGGGGA

SEQ ID NO: 38 - protein, 15 aa, synthetic construct
GGGGAGGGGAGGGGA

SEQ ID NO: 39 - protein, 20 aa, synthetic construct
GGGGAGGGGAGGGGAGGGGA

SEQ ID NO: 40 - protein, 25 aa, synthetic construct
GGGGAGGGGAGGGGAGGGGAGGGGA

SEQ ID NO: 41 - protein, 30 aa, synthetic construct
GGGGAGGGGAGGGGAGGGGAGGGGAGGGGA

SEQ ID NO: 42 - protein, 35 aa, synthetic construct
GGGGAGGGGAGGGGAGGGGAGGGGAGGGGAGGGGA

SEQ ID NO: 43 - protein, 30 aa, synthetic construct
DPALVHQRPAPPGGGGSGGGGSGGGGSGGG

SEQ ID NO: 44 - protein, 5 aa, synthetic construct
GKPGS

SEQ ID NO: 45 - protein, 25 aa, synthetic construct
GKPGSGKPGSGKPGSGKPGSGKPGS

SEQ ID NO: 46 - protein, 30 aa, synthetic construct
GKPGSGKPGSGKPGSGKPGSGKPGSGKPGS

SEQ ID NO: 47 - protein, 5 aa, synthetic construct
GGGES

SEQ ID NO: 48 - protein, 15 aa, synthetic construct
EPKSCDKTHTCPPCP

SEQ ID NO: 49 - protein, 9 aa, synthetic construct
KTHTCPPCP

SEQ ID NO: 50 - protein, 15 aa, synthetic construct
EPKSSDKTHTCPPCP

SEQ ID NO: 51 - protein, 19 aa, synthetic construct
GGGGSGGGGSKTHTCPPCP

SEQ ID NO: 52 - protein, 19 aa, synthetic construct
GKPGSGKPGSKTHTCPPCP

SEQ ID NO: 53 - protein, 14 aa, synthetic construct
GKPGSKTHTCPPCP

SEQ ID NO: 54 - protein, 5 aa, synthetic construct
EPKSC

SEQ ID NO: 55 - protein, 15 aa, synthetic construct
EPKSCGGGGSGGGGS

SEQ ID NO: 56 - protein, 15 aa, synthetic construct
EPKSCGKPGSGKPGS

SEQ ID NO: 57 - protein, 10 aa, synthetic construct
EPKSCGKPGS

SEQ ID NO: 58 - protein, 216 aa, synthetic construct
APPVAGPSVFLFPPKPKDTLMISRTPEVTCVVVDVKHEDPEVKFNWYVDGVEVHNAKTKPREEEYNSTYRVVSVLTVLHQDWLNGKEYKCKVSNKALPAPIEKTISKAKGQPREPQVYTLPPSREEMTKNQVSLTCDVSGFYPSDIAVEWESDGQPENNYKTTPPVLDSDGSFFLYSKLTVDKSRWEQGDVFSCSVMHEALHNHYTQKSLSLSPGK

SEQ ID NO: 59 - protein, 216 aa, synthetic construct
APPVAGPSVFLFPPKPKDTLMISRTPEVTCVVVDVKHEDPEVKFNWYVDGVEVHNAKTKPREEQYNSTYRVVSVLTVLHQDWLNGKEYKCKVSNKALPAPIEKTISKAKGQPREPQVYTLPPSREQMTKNQVKLTCLVKGFYPSDIAVEWESNGQPENNYKTTPPVLDSDGSFFLYSKLTVDKSRWQQGNVFSCSVMHEALHNHYTQKSLSLSPGK

SEQ ID NO: 60 - protein, 216 aa, synthetic construct; identical to SEQ ID NO: 58

SEQ ID NO: 61 - protein, 216 aa, synthetic construct
APPVAGPSVFLFPPKPKDTLMISRTPEVTCVVVDVKHEDPEVKFNWYVDGVEVHNAKTKPREEQYNSTYRVVSVLTVLHQDWLNGKEYKCKVSNKALPAPIEKTISKAKGQPREPQVYTLPPSREEMTKNQVKLTCLVKGFYPSDIAVEWESNGQPENNYKTTPPVLDSDGSFFLYSKLTVDKSRWQQGNVFSCSVMHEALHNHYTQKSLSLSPGK

SEQ ID NO: 62 - protein, 216 aa, synthetic construct
APPVAGPSVFLFPPKPKDTLMISRTPEVTCVVVDVKHEDPEVKFNWYVDGVEVHNAKTKPREEEYNSTYRVVSVLTVLHQDWLNGKEYKCKVSNKALPAPIEKTISKAKGQPREPQVYTLPPSREEMTKNQVSLTCEVSGFYPSDIAVEWESDGQPENNYKTTPPVLDSDGSFFLYSKLTVDKSRWEQGDVFSCSVMHEALHNHYTQKSLSLSPGK

SEQ ID NO: 63 - protein, 216 aa, synthetic construct; identical to SEQ ID NO: 61

SEQ ID NO: 64 - protein, 216 aa, synthetic construct
APPVAGPSVFLFPPKPKDTLMISRTPEVTCVVVDVKHEDPEVKFNWYVDGVEVHNAKTKPREEEYNSTYRVVSVLTVLHQDWLNGKEYKCKVSNKALPAPIEKTISKAKGQPREPQVYTLPPSREEMTENEVSLTCLVKGFYPSDIAVEWESDGQPENNYKTTPPVLDSDGSFFLYSKLEVDKSRWEQGDVFSCSVMHEALHNHYTQKSLSLSPGK

SEQ ID NO: 65 - protein, 216 aa, synthetic construct
APPVAGPSVFLFPPKPKDTLMISRTPEVTCVVVDVKHEDPEVKFNWYVDGVEVHNAKTKPREEQYNSTYRVVSVLTVLHQDWLNGKEYKCKVSNKALPAPIEKTISKAKGQPREPQVYTLPPSREEMTKNQVSLTCLVKGFYPSDIAVEWESNGQPENNYKTTPPVLDSKGSFFLYSKLTVDKSRWQQGNVFSCSVMHEALHNHYTQKSLSLSPGK

SEQ ID NO: 66 - protein, 216 aa, synthetic construct
APPVAGPSVFLFPPKPKDTLMISRTPEVTCVVVDVKHEDPEVKFNWYVDGVEVHNAKTKPREEEYNSTYRVVSVLTVLHQDWLNGKEYKCKVSNKALPAPIEKTISKAKGQPREPQVYTLPPSRDELTKNQVSLTCDVSGFYPSDIAVEWESDGQPENNYKTTPPVLDSDGSFFLYSKLTVDKSRWEQGDVFSCSVMHEALHNHYTQKSLSLSPGK

SEQ ID NO: 67 - protein, 216 aa, synthetic construct
APPVAGPSVFLFPPKPKDTLMISRTPEVTCVVVDVKHEDPEVKFNWYVDGVEVHNAKTKPREEQYNSTYRVVSVLTVLHQDWLNGKEYKCKVSNKALPAPIEKTISKAKGQPREPQVYTLPPSRDQLTKNQVKLTCLVKGFYPSDIAVEWESNGQPENNYKTTPPVLDSDGSFFLYSKLTVDKSRWQQGNVFSCSVMHEALHNHYTQKSLSLSPGK

SEQ ID NO: 68 - protein, 216 aa, synthetic construct
APPVAGPSVFLFPPKPKDTLMISRTPEVTCVVVDVKHEDPEVKFNWYVDGVEVHNAKTKPREEEYASTYRVVSVLTVLHQDWLNGKEYKCKVSNKALPAPIEKTISKAKGQPREPQVYTLPPSREEMTKNQVSLTCDVSGFYPSDIAVEWESDGQPENNYKTTPPVLDSDGSFFLYSKLTVDKSRWEQGDVFSCSVMHEALHNHYTQKSLSLSPGK

SEQ ID NO: 69 - protein, 216 aa, synthetic construct
APPVAGPSVFLFPPKPKDTLMISRTPEVTCVVVDVKHEDPEVKFNWYVDGVEVHNAKTKPREEQYASTYRVVSVLTVLHQDWLNGKEYKCKVSNKALPAPIEKTISKAKGQPREPQVYTLPPSREQMTKNQVKLTCLVKGFYPSDIAVEWESNGQPENNYKTTPPVLDSDGSFFLYSKLTVDKSRWQQGNVFSCSVMHEALHNHYTQKSLSLSPGK

SEQ ID NO: 70 - protein, 216 aa, synthetic construct
APPVAGPSVFLFPPKPKDTLMISRTPEVTCVVVDVKHEDPEVKFNWYVDGVEVHNAKTKPREEEYSSTYRVVSVLTVLHQDWLNGKEYKCKVSNKALPAPIEKTISKAKGQPREPQVYTLPPSREEMTKNQVSLTCDVSGFYPSDIAVEWESDGQPENNYKTTPPVLDSDGSFFLYSKLTVDKSRWEQGDVFSCSVMHEALHNHYTQKSLSLSPGK

SEQ ID NO: 71 - protein, 216 aa, synthetic construct
APPVAGPSVFLFPPKPKDTLMISRTPEVTCVVVDVKHEDPEVKFNWYVDGVEVHNAKTKPREEQYSSTYRVVSVLTVLHQDWLNGKEYKCKVSNKALPAPIEKTISKAKGQPREPQVYTLPPSREQMTKNQVKLTCLVKGFYPSDIAVEWESNGQPENNYKTTPPVLDSDGSFFLYSKLTVDKSRWQQGNVFSCSVMHEALHNHYTQKSLSLSPGK

SEQ ID NO: 72 - protein, 217 aa, synthetic construct
APEFLGGPSVFLFPPKPKDTLMISRTPEVTCVVVDVSQEDPEVQFNWYVDGVEVHNAKTKPREEEFNSTYRVVSVLTVLHQDWLNGKEYKCKVSNKGLPSSIEKTISKAKGQPREPQVYTLPPSQEEMTKNQVSLTCDVSGFYPSDIAVEWESDGQPENNYKTTPPVLDSDGSFFLYSRLTVDKSRWEEGDVFSCSVMHEALHNHYTQKSLSLSLGK

SEQ ID NO: 73 - protein, 217 aa, synthetic construct
APEFLGGPSVFLFPPKPKDTLMISRTPEVTCVVVDVSQEDPEVQFNWYVDGVEVHNAKTKPREEQFNSTYRVVSVLTVLHQDWLNGKEYKCKVSNKGLPSSIEKTISKAKGQPREPQVYTLPPSQEQMTKNQVKLTCLVKGFYPSDIAVEWESNGQPENNYKTTPPVLDSDGSFFLYSRLTVDKSRWQEGNVFSCSVMHEALHNHYTQKSLSLSLGK

SEQ ID NO: 74 - protein, 216 aa, synthetic construct
APPVAGPSVFLFPPKPKDTLMISRTPEVTCVVVDVSHEDPEVQFNWYVDGVEVHNAKTKPREEEFNSTFRVVSVLTVVHQDWLNGKEYKCKVSNKGLPAPIEKTISKTKGQPREPQVYTLPPSREEMTKNQVSLTCDVSGFYPSDIAVEWESDGQPENNYKTTPPMLDSDGSFFLYSKLTVDKSRWEQGDVFSCSVMHEALHNHYTQKSLSLSPGK

SEQ ID NO: 75 - protein, 216 aa, synthetic construct
APPVAGPSVFLFPPKPKDTLMISRTPEVTCVVVDVSHEDPEVQFNWYVDGVEVHNAKTKPREEQFNSTFRVVSVLTVVHQDWLNGKEYKCKVSNKGLPAPIEKTISKTKGQPREPQVYTLPPSREQMTKNQVKLTCLVKGFYPSDIAVEWESNGQPENNYKTTPPMLDSDGSFFLYSKLTVDKSRWQQGNVFSCSVMHEALHNHYTQKSLSLSPGK

SEQ ID NO: 76 - protein, 216 aa, synthetic construct
APPVAGPSVFLFPPKPKDTLMISRTPEVTCVVVDVKHEDPEVQFNWYVDGVEVHNAKTKPREEEFNSTFRVVSVLTVVHQDWLNGKEYKCKVSNKGLPAPIEKTISKTKGQPREPQVYTLPPSREEMTKNQVSLTCDVSGFYPSDIAVEWESDGQPENNYKTTPPMLDSDGSFFLYSKLTVDKSRWEQGDVFSCSVMHEALHNHYTQKSLSLSPGK

SEQ ID NO: 77 - protein, 216 aa, synthetic construct
APPVAGPSVFLFPPKPKDTLMISRTPEVTCVVVDVKHEDPEVQFNWYVDGVEVHNAKTKPREEQFNSTFRVVSVLTVVHQDWLNGKEYKCKVSNKGLPAPIEKTISKTKGQPREPQVYTLPPSREQMTKNQVKLTCLVKGFYPSDIAVEWESNGQPENNYKTTPPMLDSDGSFFLYSKLTVDKSRWQQGNVFSCSVMHEALHNHYTQKSLSLSPGK

SEQ ID NO: 78 - protein, 216 aa, synthetic construct
APPVAGPSVFLFPPKPKDTLMISRTPEVTCVVVDVKHEDPEVKFNWYVDGVEVHNAKTKPREEEYNSTYRVVSVLTVLHQDWLNGKEYKCKVSNKALPAPIEKTISKAKGQPREPQVYTLPPSREEMTKNQVSLTCDVSGFYPSDIAVEWESDGQPENNYKTTPPVLDSDGSFFLYSKLTVDKSRWEQGDVFSCSVLHEALHSHYTQKSLSLSPGK

SEQ ID NO: 79 - protein, 216 aa, synthetic construct
APPVAGPSVFLFPPKPKDTLMISRTPEVTCVVVDVKHEDPEVKFNWYVDGVEVHNAKTKPREEQYNSTYRVVSVLTVLHQDWLNGKEYKCKVSNKALPAPIEKTISKAKGQPREPQVYTLPPSREQMTKNQVKLTCLVKGFYPSDIAVEWESNGQPENNYKTTPPVLDSDGSFFLYSKLTVDKSRWQQGNVFSCSVLHEALHSHYTQKSLSLSPGK

SEQ ID NO: 80 - protein, 216 aa, synthetic construct
APPVAGPSVFLFPPKPKDTLMISRTPEVTCVVVDVKHEDPEVKFKWYVDGVEVHNAKTKPREEQYNSTYRVVSVLTVLHQDWLNGKEYKCKVSNKALPAPIEKTISKAKGQPREPQVYTLPPSREQMTKNQVKLTCLVKGFYPSDIAVEWESNGQPENNYKTTPPVLDSDGSFFLYSKLTVDKSRWQQGNVFSCSVMHEALHNHYTQKSLSLSPGK

SEQ ID NO: 81 - protein, 216 aa, synthetic construct; identical to SEQ ID NO: 58

SEQ ID NO: 82 - protein, 216 aa, synthetic construct
APPVAGPSVFLFPPKPKDTLMISRTPEVTCVVVDVKHEDPEVKFNWYVDGVEVHNAKTKPREEEYNSTYRVVSVLTVLHQDWLNGKEYKCKVSNKALPAPIEKTISKAKGQPREPQVYTLPPSRDELTKNQVSLTCDVSGFYPSDIAVEWESDGQPENNYKTTPPVLDSDGSFFLYSKLTVDKSRWEQGDVFSCSVLHEALHSHYTQKSLSLSPGK

SEQ ID NO: 83 - protein, 216 aa, synthetic construct
APPVAGPSVFLFPPKPKDTLMISRTPEVTCVVVDVKHEDPEVKFNWYVDGVEVHNAKTKPREEQYNSTYRVVSVLTVLHQDWLNGKEYKCKVSNKALPAPIEKTISKAKGQPREPQVYTLPPSRDQLTKNQVKLTCLVKGFYPSDIAVEWESNGQPENNYKTTPPVLDSDGSFFLYSKLTVDKSRWQQGNVFSCSVLHEALHSHYTQKSLSLSPGK

SEQ ID NO: 84 - protein, 216 aa, synthetic construct
APPVAGPSVFLFPPKPKDTLMISRTPEVTCVVVDVKHEDPEVKFNWYVDGVEVHNAKTKPREEEYNSTYRVVSVLTVLHQDWLNGKEYKCKVSNKALPAPIEKTISKAKGQPREPQVYTLPPSREEMTKNQVSLTCDVSGFYPSDIAVEWESDGQPENNYKTTPPVLDSDGSFFLYSKLTVDKSRWEQGDVFSCSVLHEALHAHYTQKSLSLSPGK

SEQ ID NO: 85 - protein, 216 aa, synthetic construct
APPVAGPSVFLFPPKPKDTLMISRTPEVTCVVVDVKHEDPEVKFNWYVDGVEVHNAKTKPREEQYNSTYRVVSVLTVLHQDWLNGKEYKCKVSNKALPAPIEKTISKAKGQPREPQVYTLPPSREQMTKNQVKLTCLVKGFYPSDIAVEWESNGQPENNYKTTPPVLDSDGSFFLYSKLTVDKSRWQQGNVFSCSVLHEALHAHYTQKSLSLSPGK

SEQ ID NO: 86 - protein, 216 aa, synthetic construct
APPVAGPSVFLFPPKPKDTLMISRTPEVTCVVVDVKHEDPEVKFNWYVDGVEVHNAKTKPREEEYNSTYRVVSVLTVLHQDWLNGKEYKCKVSNKALPAPIEKTISKAKGQPREPQVYTLPPSRDELTKNQVSLTCDVSGFYPSDIAVEWESDGQPENNYKTTPPVLDSDGSFFLYSKLTVDKSRWEQGDVFSCSVLHEALHAHYTQKSLSLSPGK

SEQ ID NO: 87 - protein, 216 aa, synthetic construct
APPVAGPSVFLFPPKPKDTLMISRTPEVTCVVVDVKHEDPEVKFNWYVDGVEVHNAKTKPREEQYNSTYRVVSVLTVLHQDWLNGKEYKCKVSNKALPAPIEKTISKAKGQPREPQVYTLPPSRDQLTKNQVKLTCLVKGFYPSDIAVEWESNGQPENNYKTTPPVLDSDGSFFLYSKLTVDKSRWQQGNVFSCSVLHEALHAHYTQKSLSLSPGK

SEQ ID NO: 88 - protein, 216 aa, synthetic construct; identical to SEQ ID NO: 58

SEQ ID NO: 89 - protein, 215 aa, synthetic construct
APPVAGPSVFLFPPKPKDTLMISRTPEVTCVVVDVKHEDPEVKFNWYVDGVEVHNAKTKPREEQYNSTYRVVSVLTVLHQDWLNGKEYKCKVSNKALPAPIEKTISKAKGQPREPQVYTLPPSREQMTKNQVKLTCLVKGFYPSDIAVEWESNGQPENNYKTTPPVLDSDGSFFLYSKLTVDKSRWQQGNVFSCSVMHEALHNHYTQKSLSLSPG

SEQ ID NO: 90 - protein, 98 aa, synthetic construct
ASTKGPSVFPLAPSSKSTSGGTAALGCLVKDYFPEPVTVSWNSGALTSGVHTFPAVLQSSGLYSLSSVVTVPSSSLGTQTYICNVNHKPSNTKVDKKV

SEQ ID NO: 91 - protein, 98 aa, synthetic construct
ASTKGPSVFPLAPSSKSTSGGTAALGCLVKDYFPEPVTVSWNSGALTSGVHTFPAVLQSSGLYSLSSVVTVPSSSLGTQTYICNVNHKPSDTKVDKKV

SEQ ID NO: 92 - protein, 98 aa, synthetic construct
ASTKGPSVFPLAPCSRSTSESTAALGCLVKDYFPEPVTVSWNSGALTSGVHTFPAVLQSSGLYSLSSVVTVPSSNFGTQTYTCNVDHKPSNTKVDKTV

SEQ ID NO: 93 - protein, 98 aa, synthetic construct
ASTKGPSVFPLAPCSRSTSESTAALGCLVKDYFPEPVTVSWNSGALTSGVHTFPAVLQSSGLYSLSSVVTVPSSNFGTQTYTCNVDHKPSDTKVDKTV

SEQ ID NO: 94 - protein, 98 aa, synthetic construct
ASTKGPSVFPLAPCSRSTSESTAALGCLVKDYFPEPVTVSWNSGALTSGVHTFPAVLQSSGLYSLSSVVTVPSSSLGTKTYTCNVDHKPSNTKVDKRV

SEQ ID NO: 95 - protein, 98 aa, synthetic construct
ASTKGPSVFPLAPCSRSTSESTAALGCLVKDYFPEPVTVSWNSGALTSGVHTFPAVLQSSGLYSLSSVVTVPSSSLGTKTYTCNVDHKPSDTKVDKRV

SEQ ID NO: 96 - protein, 15 aa, synthetic construct
EPKSCDKTHTCPPCP

SEQ ID NO: 97 - protein, 12 aa, synthetic construct
ERKCCVECPPCP

SEQ ID NO: 98 - protein, 12 aa, synthetic construct
ESKYGPPCPSCP

SEQ ID NO: 99 - protein, 107 aa, synthetic construct [sequence omitted]

SEQ ID NO: 100 - protein, 106 aa, synthetic construct
GQPKAAPSVTLFPPSSEELQANKATLVCLISDFYPGAVTVAWKADSSPVKAGVETTTPSKQSNNKYAASSYLSLTPEQWKSHRSYSCQVTHEGSTVEKTVAPTECS

SEQ ID NO: 101 - protein, 124 aa, synthetic construct
QVQLVQSGAEVKKPGASVKVSCKVSGFSVTSYNVHWVRQAPGQGLEWMGVMWSGGNTDYNSKFQGRVTMTRDTSTNTVYMELSSLRSEDTAVYYCARAGRYYHDSNYYWDFPYWGQGTLVTVSS

SEQ ID NO: 102 - protein, 5 aa, synthetic construct
SYNVH

SEQ ID NO: 103 - protein, 16 aa, synthetic construct
VMWSGGNTDYNSKFQG

SEQ ID NO: 104 - protein, 16 aa, synthetic construct
AGRYYHDSNYYWDFPY

SEQ ID NO: 105 - protein, 107 aa, synthetic construct
DIQMTQSPSSVSASVGDRVTITCRASEDIYSGLAWYQQKPGKSPKLLIYGASSLQDGVPSRFSGSGSGTDYTLTISSLQPEDFATYFCQEGLKSPYTFGAGTKLEIK

SEQ ID NO: 106 - protein, 11 aa, synthetic construct
RASEDIYSGLA

SEQ ID NO: 107 - protein, 7 aa, synthetic construct
GASSLQD

SEQ ID NO: 108 - protein, 9 aa, synthetic construct
QEGLKSPYT

SEQ ID NO: 109 - protein, 119 aa, synthetic construct
EVQLVESGGGLVQPGGSLRLSCAASGFTFSSFGMHWVRQAPGKGLEWVSYISSGSTTIYYADSVKGRFTISRDNAKNSLYLQMNSLRAEDTAVYYCARAPLLRGAMDYWGQGTLVTVSS

SEQ ID NO: 110 - protein, 5 aa, synthetic construct
SFGMH

SEQ ID NO: 111 - protein, 17 aa, synthetic construct
YISSGSTTIYYADSVKG

SEQ ID NO: 112 - protein, 10 aa, synthetic construct
APLLRGAMDY

SEQ ID NO: 113 - protein, 107 aa, synthetic construct
DIVMTQSPDSLAVSLGERATINCKASQDVSTAVVWYQQKPGQSPKLLIYWASTRHTGVPDRFTGSGSGTDYTLTISSLQAEDVAVYHCQQHYSTPYTFGGGTKLEIK

SEQ ID NO: 114 - protein, 11 aa, synthetic construct
KASQDVSTAVV

SEQ ID NO: 115 - protein, 7 aa, synthetic construct
WASTRHT

SEQ ID NO: 116 - protein, 9 aa, synthetic construct
QQHYSTPYT

SEQ ID NO: 117 - protein, 114 aa, synthetic construct
EVQLVESGGGLVQPGGSLKLSCAASGFDIIDDYIHWVRQASGKGLEWVGRIDPASANTKYVPSVKGRFTISADTSKNTAYLQMNSLKTEDTAVYYCTRKGFAYWGQGTLVTVSS

SEQ ID NO: 118 - protein, 5 aa, synthetic construct
DDYIH

SEQ ID NO: 119 - protein, 17 aa, synthetic construct
RIDPASANTKYVPSVKG

SEQ ID NO: 120 - protein, 5 aa, synthetic construct
KGFAY

SEQ ID NO: 121 - protein, 107 aa, synthetic construct
NIVMTQTPLSLSVTPGQPASISCKASENVGTYVSWYLQKPGQSPQLLIYGTSNRYTGVPDRFTGSGSATDFTLKISRVEAEDVGVYHCGQSYRYPYTFGGGTKLEIK

SEQ ID NO: 122 - protein, 11 aa, synthetic construct
KASENVGTYVS

SEQ ID NO: 123 - protein, 7 aa, synthetic construct
GTSNRYT

SEQ ID NO: 124 - protein, 9 aa, synthetic construct
GQSYRYPYT

SEQ ID NO: 125 - protein, 119 aa, synthetic construct
QVQLVQSGAEVKKPGASVKVSCKASGYTFTDYEIHWMRQAPGQGLEWMGGIDPETGGTAYNQKFQGRVTMTADKSISTAYMELSRLRSDDTAVYYCTRFLVHHYAMDYWGQGTTVTVSS

SEQ ID NO: 126 - protein, 5 aa, synthetic construct
DYEIH

SEQ ID NO: 127 - protein, 17 aa, synthetic construct
GIDPETGGTAYNQKFQG

SEQ ID NO: 128 - protein, 10 aa, synthetic construct
FLVHHYAMDY

SEQ ID NO: 129 - protein, 112 aa, synthetic construct
DVVMTQSPLSLPVTLGQPASISCRSSQSLLDSDGKTYLNWLQKRPGQSPRRLIYLVSKLDSGVPDRFTGSGSGTDFTLKISRVEAEDVGVYYCWQGTQLPFTFGAGTKLEIK

SEQ ID NO: 130 - protein, 16 aa, synthetic construct
RSSQSLLDSDGKTYLN

SEQ ID NO: 131 - protein, 7 aa, synthetic construct
LVSKLDS

SEQ ID NO: 132 - protein, 9 aa, synthetic construct
WQGTQLPFT

SEQ ID NO: 133 - protein, 118 aa, synthetic construct
QVQLVQSGAEVKKPGASVKVSCKVSGFSLTNYGVSWVRQAPGQGLEWMGGIWGDGSTDYDSKFQGRVTMTRDTSTSTVYMELSSLRSEDTAVYFCTRYSSYTNWFVYWGQGTLVTVSS

SEQ ID NO: 134 - protein, 5 aa, synthetic construct
NYGVS

SEQ ID NO: 135 - protein, 16 aa, synthetic construct
GIWGDGSTDYDSKFQG

SEQ ID NO: 136 - protein, 10 aa, synthetic construct
YSSYTNWFVY

SEQ ID NO: 137 - protein, 107 aa, synthetic construct
DIQMTQSPSSLSASVGDRVTITCRAREDIYNGLAWYQQKPGKSPKLLIYNANRLHTGVPSRFSGSGSGTDFTLTISSLQPEDFATYFCQQYYDYPLTFGSGTKVEIK

SEQ ID NO: 138 - protein, 11 aa, synthetic construct
RAREDIYNGLA

SEQ ID NO: 139 - protein, 7 aa, synthetic construct
NANRLHT

SEQ ID NO: 140 - protein, 9 aa, synthetic construct
QQYYDYPLT

SEQ ID NO: 141 - protein, 117 aa, synthetic construct
QVQLVQSGAEVKKPGASVKVSCKASGYTFTDYYMDWVRQAPGQSLEWMGYIYPHTGRTDYNQKFQGRVTMTVDKSISTAYMELSRLRSDDTAVYFCARDSNYYFDVWGAGTTVTVSS

SEQ ID NO: 142 - protein, 5 aa, synthetic construct
DYYMD

SEQ ID NO: 143 - protein, 17 aa, synthetic construct
YIYPHTGRTDYNQKFQG

SEQ ID NO: 144 - protein, 8 aa, synthetic construct
DSNYYFDV

SEQ ID NO: 145 - protein, 107 aa, synthetic construct
DIVMTQSPLSLPVTPGEPASISCRASQNVRTAVAWYLQKPGQSPQALIYLASNRHTGVPDRFTGSGSGTDFTLKISRVEAEDVGVYFCLQHWNYPYTFGGGTKLEIK

SEQ ID NO: 146 - protein, 11 aa, synthetic construct
RASQNVRTAVA

SEQ ID NO: 147 - protein, 7 aa, synthetic construct
LASNRHT

SEQ ID NO: 148 - protein, 9 aa, synthetic construct
LQHWNYPYT

SEQ ID NO: 149 - protein, 119 aa, synthetic construct
QVQLVQSGAEVKKPGASVKVSCKVSGFSLNTYGVIWVRQAPGQGLEWMGVIWANGNTNYNSKLQGRVTMTRDTSTSTVYMELRSLRSDDTAVYFCARARYYYSGVLDYWGQGTLVTVSS

SEQ ID NO: 150 - protein, 5 aa, synthetic construct
TYGVI

SEQ ID NO: 151 - protein, 16 aa, synthetic construct
VIWANGNTNYNSKLQG

SEQ ID NO: 152 - protein, 11 aa, synthetic construct
ARYYYSGVLDY

SEQ ID NO: 153 - protein, 112 aa, synthetic construct
DVVLTQSPLSLPVTLGQPASISCRSSQSLVHSDGNTYLDWYQQRPGQSPRLLIYKVSNRFSGVPDRFIGSGSGSDFTLKISRVEAEDVGVYYCFQATHDPWAFGGGTKVEIK

SEQ ID NO: 154 - protein, 16 aa, synthetic construct
RSSQSLVHSDGNTYLD

SEQ ID NO: 155 - protein, 7 aa, synthetic construct
KVSNRFS

SEQ ID NO: 156 - protein, 9 aa, synthetic construct
FQATHDPWA

SEQ ID NO: 157 - protein, 114 aa, synthetic construct
QVQLVQSGAEVKKPGASVKVSCKASDFNIEDDYIHWVRQAPGQGLEWMGRIEPAGGNTKYAPKFQGRVTMTADTSINTAYMELSRLRSDDTAVYYCARKGFAYWGQGTLVTVSS

SEQ ID NO: 158 - protein, 17 aa, synthetic construct
RIEPAGGNTKYAPKFQG

SEQ ID NO: 159 - protein, 107 aa, synthetic construct
KIVMTQSPDSLAVSLGERATINCKASENVGTYVSWYQQKPGQSPKLLIYGTSNRYTGVPDRFTGSGSATDFTLTISSLQAEDVAVYHCGQSYSYPYTFGGGTKLEIK

SEQ ID NO: 160 - protein, 9 aa, synthetic construct
GQSYSYPYT

SEQ ID NO: 161 - protein, 124 aa, synthetic construct
EVQLVESGGGLVKPGGSLRLSCAVSGFSLTSHSVSWVRQAPGKGPEWVGRMWYDGDTVYNSPVKGRFTISRDTSKNTLYLQMNSLKTEDTAVYYCTRNSRYYDVSYHRFVMDAWGQGTTVTVSS

SEQ ID NO: 162 - protein, 5 aa, synthetic construct
SHSVS

SEQ ID NO: 163 - protein, 16 aa, synthetic construct
RMWYDGDTVYNSPVKG

SEQ ID NO: 164 - protein, 16 aa, synthetic construct
NSRYYDVSYHRFVMDA

SEQ ID NO: 165 - protein, 107 aa, synthetic construct
DTVLTQSPSSLSASVGDRVTITCRASESVSTGMHWYQQKPGKQPKLLIYGASNLESGVPARFSGSGSGTDFTLTISSLQPEDFATYFCQQSWSDPWTFGGGTKVEIK

SEQ ID NO: 166 - protein, 11 aa, synthetic construct
RASESVSTGMH

SEQ ID NO: 167 - protein, 7 aa, synthetic construct
GASNLES

SEQ ID NO: 168 - protein, 9 aa, synthetic construct
QQSWSDPWT

SEQ ID NO: 169 - protein, 119 aa, synthetic construct
QVQLVQSGAEVKKPGASVKVSCKASGYKFTDHYMDWVRQAPGQSLEWMGYIHPHTGRTSYNQKFQGRVTMTVDRSTNTAYMELSSLRSEDTAVYYCARDSNYVNAVDYWGQGTLVTVSS

SEQ ID NO: 170 - protein, 5 aa, synthetic construct
DHYMD

SEQ ID NO: 171 - protein, 17 aa, synthetic construct
YIHPHTGRTSYNQKFQG

SEQ ID NO: 172 - protein, 10 aa, synthetic construct
DSNYVNAVDY

SEQ ID NO: 173 - protein, 108 aa, synthetic construct
QVVLTQSPGTLSLSPGERATLSCRASSSVSSSYLHWYQQKPGQSPRLLIYSTSNLASGVPSRFSGSGSGTDYTLTISRLEPEDFAVYYCQQYDSSPSTFGSGTKLEIK

SEQ ID NO: 174 - protein, 12 aa, synthetic construct
RASSSVSSSYLH

SEQ ID NO: 175 - protein, 7 aa, synthetic construct
STSNLAS

SEQ ID NO: 176 - protein, 9 aa, synthetic construct
QQYDSSPST

SEQ ID NO: 177 - protein, 449 aa, synthetic construct
QVQLVQSGAEVKKPGSSVKVSCKASGYTFTDQTIHWMRQAPGQGLEWIGYIYPRDDSPKYNENFKGKVTITADKSTSTAYMELSSLRSEDTAVYYCAIPDRSGYAWFIYWGQGTLVTVSSASTKGPSVFPLAPSSKSTSGGTAALGCLVKDYFPEPVTVSWNSGALTSGVHTFPAVLQSSGLYSLSSVVTVPSSSLGTQTYICNVNHKPSNTKVDKKVEPKSCDKTHTCPPCPAPPVAGPSVFLFPPKPKDTLMISRTPEVTCVVVDVKHEDPEVKFNWYVDGVEVHNAKTKPREEQYNSTYRVVSVLTVLHQDWLNGKEYKCKVSNKALPAPIEKTISKAKGQPREPQVYTLPPSREEMTKNQVSLTCLVKGFYPSDIAVEWESNGQPENNYKTTPPVLDSDGSFFLYSKLTVDKSRWQQGNVFSCSVLHEALHSHYTQKSLSLSPGK

SEQ ID NO: 178 - protein, 214 aa, synthetic construct
DIQMTQSPSSLSASVGDRVTITCKASRDVAIAVAWYQQKPGKVPKLLIYWASTRHTGVPSRFSGSGSRTDFTLTISSLQPEDVADYFCHQYSSYPFTFGSGTKLEIKRTVAAPSVFIFPPSDEQLKSGTASVVCLLNNFYPREAKVQWKVDNALQSGNSQESVTEQDSKDSTYSLSSTLTLSKADYEKHKVYACEVTHQGLSSPVTKSFNRGEC

SEQ ID NO: 179 - protein, 120 aa, synthetic construct
QVQLVQSGAEVKKPGSSVKVSCKASGYTFTDQTIHWMRQAPGQGLEWIGYIYPRDDSPKYNENFKGKVTITADKSTSTAYMELSSLRSEDTAVYYCAIPDRSGYAWFIYWGQGTLVTVSS

SEQ ID NO: 180 - protein, 5 aa, synthetic construct
DQTIH

SEQ ID NO: 181 - protein, 17 aa, synthetic construct
YIYPRDDSPKYNENFKG

SEQ ID NO: 182 - protein, 11 aa, synthetic construct
PDRSGYAWFIY

SEQ ID NO: 183 - protein, 107 aa, synthetic construct
DIQMTQSPSSLSASVGDRVTITCKASRDVAIAVAWYQQKPGKVPKLLIYWASTRHTGVPSRFSGSGSRTDFTLTISSLQPEDVADYFCHQYSSYPFTFGSGTKLEIK

SEQ ID NO: 184 - protein, 11 aa, synthetic construct
KASRDVAIAVA

SEQ ID NO: 185 - protein, 9 aa, synthetic construct
HQYSSYPFT

SEQ ID NO: 186 - protein, 446 aa, synthetic construct
EVQLVQSGAEVKKPGESLKISCKGSGYSFSNYWIGWVRQMPGKGLEWMGIIDPSNSYTRYSPSFQGQVTISADKSISTAYLQWSSLKASDTAMYYCARWYYKPFDVWGQGTLVTVSSASTKGPSVFPLAPSSKSTSGGTAALGCLVKDYFPEPVTVSWNSGALTSGVHTFPAVLQSSGLYSLSSVVTVPSSSLGTQTYICNVNHKPSDTKVDKKVEPKSCDKTHTCPPCPAPPVAGPSVFLFPPKPKDTLMISRTPEVTCVVVDVKHEDPEVKFNWYVDGVEVHNAKTKPREEEYNSTYRVVSVLTVLHQDWLNGKEYKCKVSNKALPAPIEKTISKAKGQPREPQVYTLPPSREEMTKNQVSLTCDVSGFYPSDIAVEWESDGQPENNYKTTPPVLDSDGSFFLYSKLTVDKSRWEQGDVFSCSVLHEALHSHYTQKSLSLSPGK

SEQ ID NO: 187 - protein, 477 aa, synthetic construct
EVQLVESGGGLVQPGGSLRLSCAASGFTFSSFGMHWVRQAPGKGLEWVSYISSGSTTIYYADSVKGRFTISRDNAKNSLYLQMNSLRAEDTAVYYCARAPLLRGAMDYWGQGTLVTVSSGKPGSGKPGSGKPGSGKPGSDIVMTQSPDSLAVSLGERATINCKASQDVSTAVVWYQQKPGQSPKLLIYWASTRHTGVPDRFTGSGSGTDYTLTISSLQAEDVAVYHCQQHYSTPYTFGGGTKLEIKEPKSSDKTHTCPPCPAPPVAGPSVFLFPPKPKDTLMISRTPEVTCVVVDVKHEDPEVKFNWYVDGVEVHNAKTKPREEQYNSTYRVVSVLTVLHQDWLNGKEYKCKVSNKALPAPIEKTISKAKGQPREPQVYTLPPSREQMTKNQVKLTCLVKGFYPSDIAVEWESNGQPENNYKTTPPVLDSDGSFFLYSKLTVDKSRWQQGNVFSCSVLHEALHSHYTQKSLSLSPGK

SEQ ID NO: 188 - protein, 217 aa, synthetic construct
QSVLTQPPSVSGAPGQRVTISCTGSSSNIGSGYDVHWYQQLPGTAPKLLIYGNSKRPSGVPDRFSGSKSGTSASLAITGLQSEDEADYYCASWTDGLSLVVFGGGTKLTVLGQPKAAPSVTLFPPSSEELQANKATLVCLISDFYPGAVTVAWKADSSPVKAGVETTTPSKQSNNKYAASSYLSLTPEQWKSHRSYSCQVTHEGSTVEKTVAPTECS

SEQ ID NO: 189 - protein, 449 aa, synthetic construct
QVQLVQSGAEVKKPGSSVKVSCKASGYTFTDQTIHWMRQAPGQGLEWIGYIYPRDDSPKYNENFKGKVTITADKSTSTAYMELSSLRSEDTAVYYCAIPDRSGYAWFIYWGQGTLVTVSSASTKGPSVFPLAPSSKSTSGGTAALGCLVKDYFPEPVTVSWNSGALTSGVHTFPAVLQSSGLYSLSSVVTVPSSSLGTQTYICNVNHKPSDTKVDKKVEPKSCDKTHTCPPCPAPPVAGPSVFLFPPKPKDTLMISRTPEVTCVVVDVKHEDPEVKFNWYVDGVEVHNAKTKPREEEYNSTYRVVSVLTVLHQDWLNGKEYKCKVSNKALPAPIEKTISKAKGQPREPQVYTLPPSREEMTKNQVSLTCDVSGFYPSDIAVEWESDGQPENNYKTTPPVLDSDGSFFLYSKLTVDKSRWEQGDVFSCSVLHEALHSHYTQKSLSLSPGK

SEQ ID NO: 190 - protein, 477 aa, synthetic construct; identical to SEQ ID NO: 187

SEQ ID NO: 191 - protein, 214 aa, synthetic construct; identical to SEQ ID NO: 178

SEQ ID NO: 192 - protein, 445 aa, synthetic construct
QVQLVQSGAEVKKPGASVKVSCKASGYIFITYWMTWVRQAPGQGLEWMGQIFPASGSADYNEKFEGRVTMTTDTSTSTAYMELRSLRSDDTAVYYCARGGGGFAYWGQGTLVTVSSASTKGPSVFPLAPSSKSTSGGTAALGCLVKDYFPEPVTVSWNSGALTSGVHTFPAVLQSSGLYSLSSVVTVPSSSLGTQTYICNVNHKPSDTKVDKKVEPKSCDKTHTCPPCPAPPVAGPSVFLFPPKPKDTLMISRTPEVTCVVVDVKHEDPEVKFNWYVDGVEVHNAKTKPREEEYNSTYRVVSVLTVLHQDWLNGKEYKCKVSNKALPAPIEKTISKAKGQPREPQVYTLPPSREEMTKNQVSLTCDVSGFYPSDIAVEWESDGQPENNYKTTPPVLDSDGSFFLYSKLTVDKSRWEQGDVFSCSVLHEALHSHYTQKSLSLSPGK

SEQ ID NO: 193 - protein, 477 aa, synthetic construct; identical to SEQ ID NO: 187

SEQ ID NO: 194 - protein, 214 aa, synthetic construct
DIQMTQSPSSLSASVGDRVTITCRTSENIYSYLAWYQQKPGKAPKLLIYNAKTLAEGVPSRFSGSGSGTDFTLTISSLQPEDFATYYCQHHYGIPFTFGQGTKVEIKRTVAAPSVFIFPPSDEQLKSGTASVVCLLNNFYPREAKVQWKVDNALQSGNSQESVTEQDSKDSTYSLSSTLTLSKADYEKHKVYACEVTHQGLSSPVTKSFNRGEC

SEQ ID NO: 195 - protein, 444 aa, synthetic construct
QVQLVQSGAEVKKPGSSVKVSCKASGYKFTRYVMHWVRQAPGQGLEWMGYINPYNDGTNYNEKFKGRVTITADKSTSTAYMELSSLRSEDTAVYYCARNWDTGLWGQGTTVTVSSASTKGPSVFPLAPSSKSTSGGTAALGCLVKDYFPEPVTVSWNSGALTSGVHTFPAVLQSSGLYSLSSVVTVPSSSLGTQTYICNVNHKPSDTKVDKKVEPKSCDKTHTCPPCPAPPVAGPSVFLFPPKPKDTLMISRTPEVTCVVVDVKHEDPEVKFNWYVDGVEVHNAKTKPREEEYNSTYRVVSVLTVLHQDWLNGKEYKCKVSNKALPAPIEKTISKAKGQPREPQVYTLPPSREEMTKNQVSLTCDVSGFYPSDIAVEWESDGQPENNYKTTPPVLDSDGSFFLYSKLTVDKSRWEQGDVFSCSVLHEALHSHYTQKSLSLSPGK

SEQ ID NO: 196 - protein, 477 aa, synthetic construct; identical to SEQ ID NO: 187

SEQ ID NO: 197 - protein, 214 aa, synthetic construct
DIQMTQSPSSLSASVGDRVTITCKASDHILKFLTWYQQKPGKAPKLLIYGATSLETGVPSRFSGSGSGTDFTLTISSLQPEDFATYYCQMYWSTPFTFGGGTKVEIKRTVAAPSVFIFPPSDEQLKSGTASVVCLLNNFYPREAKVQWKVDNALQSGNSQESVTEQDSKDSTYSLSSTLTLSKADYEKHKVYACEVTHQGLSSPVTKSFNRGEC

SEQ ID NO: 198 - protein, 453 aa, synthetic construct
QVQLVESGGGVVQPGRSLRLSCAASGFTFSSYGMHWVRQAPGKGLEWVAVIWYDGSNEYYADSVKGRFTISRDNSKNTLYLQMNSLRAEDTAVYYCARDRGYTSSWYPDAFDIWGQGTMVTVSSASTKGPSVFPLAPSSKSTSGGTAALGCLVKDYFPEPVTVSWNSGALTSGVHTFPAVLQSSGLYSLSSVVTVPSSSLGTQTYICNVNHKPSDTKVDKKVEPKSCDKTHTCPPCPAPPVAGPSVFLFPPKPKDTLMISRTPEVTCVVVDVKHEDPEVKFNWYVDGVEVHNAKTKPREEEYNSTYRVVSVLTVLHQDWLNGKEYKCKVSNKALPAPIEKTISKAKGQPREPQVYTLPPSREEMTKNQVSLTCDVSGFYPSDIAVEWESDGQPENNYKTTPPVLDSDGSFFLYSKLTVDKSRWEQGDVFSCSVLHEALHSHYTQKSLSLSPGK

SEQ ID NO: 199 - protein, 477 aa, synthetic construct; identical to SEQ ID NO: 187

SEQ ID NO: 200 - protein, 217 aa, synthetic construct
QSVLTQPPSVSGAPGQRVTISCTGSSSNTGAGYDVHWYQQVPGTAPKLLIYGSGNRPSGVPDRFSGSKSGTSASLAITGLQAEDEADYYCQSYDSSLSGWVFGGGTRLTVLGQPKAAPSVTLFPPSSEELQANKATLVCLISDFYPGAVTVAWKADSSPVKAGVETTTPSKQSNNKYAASSYLSLTPEQWKSHRSYSCQVTHEGSTVEKTVAPTECS

SEQ ID NO: 201 - protein, 452 aa, synthetic construct
EVQLLESGGGLVQPGGSLRLSCAASGFTFSAYGMDWVRQAPGKGLEWVSSISPSGGRTKYADSVKGRFTISRDNSKNTLYLQMNSLRAEDTAVYYCAKDLGGGYYYYYGMDVWGQGTLVTVSSASTKGPSVFPLAPSSKSTSGGTAALGCLVKDYFPEPVTVSWNSGALTSGVHTFPAVLQSSGLYSLSSVVTVPSSSLGTQTYICNVNHKPSDTKVDKKVEPKSCDKTHTCPPCPAPPVAGPSVFLFPPKPKDTLMISRTPEVTCVVVDVKHEDPEVKFNWYVDGVEVHNAKTKPREEEYNSTYRVVSVLTVLHQDWLNGKEYKCKVSNKALPAPIEKTISKAKGQPREPQVYTLPPSREEMTKNQVSLTCDVSGFYPSDIAVEWESDGQPENNYKTTPPVLDSDGSFFLYSKLTVDKSRWEQGDVFSCSVLHEALHSHYTQKSLSLSPGK

SEQ ID NO: 202 - protein, 477 aa, synthetic construct; identical to SEQ ID NO: 187

SEQ ID NO: 203 - protein, 218 aa, synthetic construct
QYELTQPASVSGSPGQSITISCTGTSSDVGGYNYVSWYQQHPGKAPKLMIYEVSNRPSGVSNRFSGSKSGNTASLTISGLQAEDEADYYCSSYTSSSTLFYVFGTGTKVTVLGQPKAAPSVTLFPPSSEELQANKATLVCLISDFYPGAVTVAWKADSSPVKAGVETTTPSKQSNNKYAASSYLSLTPEQWKSHRSYSCQVTHEGSTVEKTVAPTECS

SEQ ID NO: 204 - protein, 446 aa, synthetic construct; identical to SEQ ID NO: 186

SEQ ID NO: 205 - protein, 482 aa, synthetic construct
EVQLVESGGGLVKPGGSLRLSCAVSGFSLTSHSVSWVRQAPGKGPEWVGRMWYDGDTVYNSPVKGRFTISRDTSKNTLYLQMNSLKTEDTAVYYCTRNSRYYDVSYHRFVMDAWGQGTTVTVSSGKPGSGKPGSGKPGSGKPGSDTVLTQSPSSLSASVGDRVTITCRASESVSTGMHWYQQKPGKQPKLLIYGASNLESGVPARFSGSGSGTDFTLTISSLQPEDFATYFCQQSWSDPWTFGGGTKVEIKEPKSSDKTHTCPPCPAPPVAGPSVFLFPPKPKDTLMISRTPEVTCVVVDVKHEDPEVKFNWYVDGVEVHNAKTKPREEQYNSTYRVVSVLTVLHQDWLNGKEYKCKVSNKALPAPIEKTISKAKGQPREPQVYTLPPSREQMTKNQVKLTCLVKGFYPSDIAVEWESNGQPENNYKTTPPVLDSDGSFFLYSKLTVDKSRWQQGNVFSCSVLHEALHSHYTQKSLSLSPGK

SEQ ID NO: 206 - protein, 217 aa, synthetic construct; identical to SEQ ID NO: 188

SEQ ID NO: 207 - protein, 449 aa, synthetic construct; identical to SEQ ID NO: 189

SEQ ID NO: 208 - protein, 482 aa, synthetic construct; identical to SEQ ID NO: 205

SEQ ID NO: 209 - protein, 214 aa, synthetic construct; identical to SEQ ID NO: 178

SEQ ID NO: 210 - protein, 445 aa, synthetic construct; identical to SEQ ID NO: 192

SEQ ID NO: 211 - protein, 482 aa, synthetic construct; identical to SEQ ID NO: 205

SEQ ID NO: 212 - protein, 214 aa, synthetic construct; identical to SEQ ID NO: 194

SEQ ID NO: 213 - protein, 444 aa, synthetic construct; identical to SEQ ID NO: 195

SEQ ID NO: 214 - protein, 482 aa, synthetic construct; identical to SEQ ID NO: 205

SEQ ID NO: 215 - protein, 214 aa, synthetic construct; identical to SEQ ID NO: 197

SEQ ID NO: 216 - protein, 453 aa, synthetic construct; identical to SEQ ID NO: 198

SEQ ID NO: 217 - protein, 482 aa, synthetic construct; identical to SEQ ID NO: 205

SEQ ID NO: 218 - protein, 217 aa, synthetic construct; identical to SEQ ID NO: 200

SEQ ID NO: 219 - protein, 452 aa, synthetic construct; identical to SEQ ID NO: 201

SEQ ID NO: 220 - protein, 482 aa, synthetic construct; identical to SEQ ID NO: 205

SEQ ID NO: 221 - protein, 218 aa, synthetic construct; identical to SEQ ID NO: 203

SEQ ID NO: 222 - protein, 448 aa, synthetic construct
EVQLVESGGGLVQPGGSLRLSCAASGFTFSSFGMHWVRQAPGKGLEWVSYISSGSTTIYYADSVKGRFTISRDNAKNSLYLQMNSLRAEDTAVYYCARAPLLRGAMDYWGQGTLVTVSSASTKGPSVFPLAPSSKSTSGGTAALGCLVKDYFPEPVTVSWNSGALTSGVHTFPAVLQSSGLYSLSSVVTVPSSSLGTQTYICNVNHKPSDTKVDKKVEPKSCDKTHTCPPCPAPPVAGPSVFLFPPKPKDTLMISRTPEVTCVVVDVKHEDPEVKFNWYVDGVEVHNAKTKPREEEYNSTYRVVSVLTVLHQDWLNGKEYKCKVSNKALPAPIEKTISKAKGQPREPQVYTLPPSREEMTKNQVSLTCDVSGFYPSDIAVEWESDGQPENNYKTTPPVLDSDGSFFLYSKLTVDKSRWEQGDVFSCSVLHEALHSHYTQKSLSLSPGK

SEQ ID NO: 223 - protein, 479 aa, synthetic construct
EVQLVQSGAEVKKPGESLKISCKGSGYSFSNYWIGWVRQMPGKGLEWMGIIDPSNSYTRYSPSFQGQVTISADKSISTAYLQWSSLKASDTAMYYCARWYYKPFDVWGQGTLVTVSSGKPGSGKPGSGKPGSGKPGSQSVLTQPPSVSGAPGQRVTISCTGSSSNIGSGYDVHWYQQLPGTAPKLLIYGNSKRPSGVPDRFSGSKSGTSASLAITGLQSEDEADYYCASWTDGLSLVVFGGGTKLTVLEPKSSDKTHTCPPCPAPPVAGPSVFLFPPKPKDTLMISRTPEVTCVVVDVKHEDPEVKFNWYVDGVEVHNAKTKPREEQYNSTYRVVSVLTVLHQDWLNGKEYKCKVSNKALPAPIEKTISKAKGQPREPQVYTLPPSREQMTKNQVKLTCLVKGFYPSDIAVEWESNGQPENNYKTTPPVLDSDGSFFLYSKLTVDKSRWQQGNVFSCSVLHEALHSHYTQKSLSLSPGK

SEQ ID NO: 224 - protein, 214 aa, synthetic construct
DIVMTQSPDSLAVSLGERATINCKASQDVSTAVVWYQQKPGQSPKLLIYWASTRHTGVPDRFTGSGSGTDYTLTISSLQAEDVAVYHCQQHYSTPYTFGGGTKLEIKRTVAAPSVFIFPPSDEQLKSGTASVVCLLNNFYPREAKVQWKVDNALQSGNSQESVTEQDSKDSTYSLSSTLTLSKADYEKHKVYACEVTHQGLSSPVTKSFNRGEC

SEQ ID NO: 225 - protein, 448 aa, synthetic construct; identical to SEQ ID NO: 222

SEQ ID NO: 226 - protein, 478 aa, synthetic construct
QVQLVQSGAEVKKPGSSVKVSCKASGYTFTDQTIHWMRQAPGQGLEWIGYIYPRDDSPKYNENFKGKVTITADKSTSTAYMELSSLRSEDTAVYYCAIPDRSGYAWFIYWGQGTLVTVSSGKPGSGKPGSGKPGSGKPGSDIQMTQSPSSLSASVGDRVTITCKASRDVAIAVAWYQQKPGKVPKLLIYWASTRHTGVPSRFSGSGSRTDFTLTISSLQPEDVADYFCHQYSSYPFTFGSGTKLEIKEPKSSDKTHTCPPCPAPPVAGPSVFLFPPKPKDTLMISRTPEVTCVVVDVKHEDPEVKFNWYVDGVEVHNAKTKPREEQYNSTYRVVSVLTVLHQDWLNGKEYKCKVSNKALPAPIEKTISKAKGQPREPQVYTLPPSREQMTKNQVKLTCLVKGFYPSDIAVEWESNGQPENNYKTTPPVLDSDGSFFLYSKLTVDKSRWQQGNVFSCSVLHEALHSHYTQKSLSLSPGK

SEQ ID NO: 227 - protein, 214 aa, synthetic construct; identical to SEQ ID NO: 224

SEQ ID NO: 228 - protein, 448 aa, synthetic construct; identical to SEQ ID NO: 222

SEQ ID NO: 229 - protein, 474 aa, synthetic construct
QVQLVQSGAEVKKPGASVKVSCKASGYIFITYWMTWVRQAPGQGLEWMGQIFPASGSADYNEKFEGRVTMTTDTSTSTAYMELRSLRSDDTAVYYCARGGGGFAYWGQGTLVTVSSGKPGSGKPGSGKPGSGKPGSDIQMTQSPSSLSASVGDRVTITCRTSENIYSYLAWYQQKPGKAPKLLIYNAKTLAEGVPSRFSGSGSGTDFTLTISSLQPEDFATYYCQHHYGIPFTFGQGTKVEIKEPKSSDKTHTCPPCPAPPVAGPSVFLFPPKPKDTLMISRTPEVTCVVVDVKHEDPEVKFNWYVDGVEVHNAKTKPREEQYNSTYRVVSVLTVLHQDWLNGKEYKCKVSNKALPAPIEKTISKAKGQPREPQVYTLPPSREQMTKNQVKLTCLVKGFYPSDIAVEWESNGQPENNYKTTPPVLDSDGSFFLYSKLTVDKSRWQQGNVFSCSVLHEALHSHYTQKSLSLSPGK

SEQ ID NO: 230 - protein, 214 aa, synthetic construct; identical to SEQ ID NO: 224

SEQ ID NO: 231 - protein, 448 aa, synthetic construct; identical to SEQ ID NO: 222

SEQ ID NO: 232 - protein, 473 aa, synthetic construct
QVQLVQSGAEVKKPGSSVKVSCKASGYKFTRYVMHWVRQAPGQGLEWMGYINPYNDGTNYNEKFKGRVTITADKSTSTAYMELSSLRSEDTAVYYCARNWDTGLWGQGTTVTVSSGKPGSGKPGSGKPGSGKPGSDIQMTQSPSSLSASVGDRVTITCKASDHILKFLTWYQQKPGKAPKLLIYGATSLETGVPSRFSGSGSGTDFTLTISSLQPEDFATYYCQMYWSTPFTFGGGTKVEIKEPKSSDKTHTCPPCPAPPVAGPSVFLFPPKPKDTLMISRTPEVTCVVVDVKHEDPEVKFNWYVDGVEVHNAKTKPREEQYNSTYRVVSVLTVLHQDWLNGKEYKCKVSNKALPAPIEKTISKAKGQPREPQVYTLPPSREQMTKNQVKLTCLVKGFYPSDIAVEWESNGQPENNYKTTPPVLDSDGSFFLYSKLTVDKSRWQQGNVFSCSVLHEALHSHYTQKSLSLSPGK

SEQ ID NO: 233 - protein, 214 aa, synthetic construct; identical to SEQ ID NO: 224

SEQ ID NO: 234 - protein, 448 aa, synthetic construct; identical to SEQ ID NO: 222

SEQ ID NO: 235 - protein, 486 aa, synthetic construct
QVQLVESGGGVVQPGRSLRLSCAASGFTFSSYGMHWVRQAPGKGLEWVAVIWYDGSNEYYADSVKGRFTISRDNSKNTLYLQMNSLRAEDTAVYYCARDRGYTSSWYPDAFDIWGQGTMVTVSSGKPGSGKPGSGKPGSGKPGSQSVLTQPPSVSGAPGQRVTISCTGSSSNTGAGYDVHWYQQVPGTAPKLLIYGSGNRPSGVPDRFSGSKSGTSASLAITGLQAEDEADYYCQSYDSSLSGWVFGGGTRLTVLEPKSSDKTHTCPPCPAPPVAGPSVFLFPPKPKDTLMISRTPEVTCVVVDVKHEDPEVKFNWYVDGVEVHNAKTKPREEQYNSTYRVVSVLTVLHQDWLNGKEYKCKVSNKALPAPIEKTISKAKGQPREPQVYTLPPSREQMTKNQVKLTCLVKGFYPSDIAVEWESNGQPENNYKTTPPVLDSDGSFFLYSKLTVDKSRWQQGNVFSCSVLHEALHSHYTQKSLSLSPGK

SEQ ID NO: 236 - protein, 214 aa, synthetic construct; identical to SEQ ID NO: 224

SEQ ID NO: 237 - protein, 448 aa, synthetic construct; identical to SEQ ID NO: 222

SEQ ID NO: 238 - protein, 486 aa, synthetic construct
EVQLLESGGGLVQPGGSLRLSCAASGFTFSAYGMDWVRQAPGKGLEWVSSISPSGGRTKYADSVKGRFTISRDNSKNTLYLQMNSLRAEDTAVYYCAKDLGGGYYYYYGMDVWGQGTLVTVSSGKPGSGKPGSGKPGSGKPGSQYELTQPASVSGSPGQSITISCTGTSSDVGGYNYVSWYQQHPGKAPKLMIYEVSNRPSGVSNRFSGSKSGNTASLTISGLQAEDEADYYCSSYTSSSTLFYVFGTGTKVTVLEPKSSDKTHTCPPCPAPPVAGPSVFLFPPKPKDTLMISRTPEVTCVVVDVKHEDPEVKFNWYVDGVEVHNAKTKPREEQYNSTYRVVSVLTVLHQDWLNGKEYKCKVSNKALPAPIEKTISKAKGQPREPQVYTLPPSREQMTKNQVKLTCLVKGFYPSDIAVEWESNGQPENNYKTTPPVLDSDGSFFLYSKLTVDKSRWQQGNVFSCSVLHEALHSHYTQKSLSLSPGK

SEQ ID NO: 239 - protein, 214 aa, synthetic construct; identical to SEQ ID NO: 224

SEQ ID NO: 240 - protein, 453 aa, synthetic construct
EVQLVESGGGLVKPGGSLRLSCAVSGFSLTSHSVSWVRQAPGKGPEWVGRMWYDGDTVYNSPVKGRFTISRDTSKNTLYLQMNSLKTEDTAVYYCTRNSRYYDVSYHRFVMDAWGQGTTVTVSSASTKGPSVFPLAPSSKSTSGGTAALGCLVKDYFPEPVTVSWNSGALTSGVHTFPAVLQSSGLYSLSSVVTVPSSSLGTQTYICNVNHKPSDTKVDKKVEPKSCDKTHTCPPCPAPPVAGPSVFLFPPKPKDTLMISRTPEVTCVVVDVKHEDPEVKFNWYVDGVEVHNAKTKPREEEYNSTYRVVSVLTVLHQDWLNGKEYKCKVSNKALPAPIEKTISKAKGQPREPQVYTLPPSREEMTKNQVSLTCDVSGFYPSDIAVEWESDGQPENNYKTTPPVLDSDGSFFLYSKLTVDKSRWEQGDVFSCSVLHEALHSHYTQKSLSLSPGK

SEQ ID NO: 241 - protein, 479 aa, synthetic construct; identical to SEQ ID NO: 223

SEQ ID NO: 242 - protein, 214 aa, synthetic construct
DTVLTQSPSSLSASVGDRVTITCRASESVSTGMHWYQQKPGKQPKLLIYGASNLESGVPARFSGSGSGTDFTLTISSLQPEDFATYFCQQSWSDPWTFGGGTKVEIKRTVAAPSVFIFPPSDEQLKSGTASVVCLLNNFYPREAKVQWKVDNALQSGNSQESVTEQDSKDSTYSLSSTLTLSKADYEKHKVYACEVTHQGLSSPVTKSFNRGEC

SEQ ID NO: 243 - protein, 453 aa, synthetic construct; identical to SEQ ID NO: 240

SEQ ID NO: 244 - protein, 478 aa, synthetic construct; identical to SEQ ID NO: 226

SEQ ID NO: 245 - protein, 214 aa, synthetic construct; identical to SEQ ID NO: 242

SEQ ID NO: 246 - protein, 453 aa, synthetic construct; identical to SEQ ID NO: 240

SEQ ID NO: 247 - protein, 474 aa, synthetic construct; identical to SEQ ID NO: 229

SEQ ID NO: 248 - protein, 214 aa, synthetic construct; identical to SEQ ID NO: 242

SEQ ID NO: 249 - protein, 453 aa, synthetic construct; identical to SEQ ID NO: 240

SEQ ID NO: 250 - protein, 473 aa, synthetic construct; identical to SEQ ID NO: 232

SEQ ID NO: 251 - protein, 214 aa, synthetic construct; identical to SEQ ID NO: 242

SEQ ID NO: 252 - protein, 453 aa, synthetic construct; identical to SEQ ID NO: 240

SEQ ID NO: 253 - protein, 486 aa, synthetic construct; identical to SEQ ID NO: 235

SEQ ID NO: 254 - protein, 214 aa, synthetic construct; identical to SEQ ID NO: 242

SEQ ID NO: 255 - protein, 453 aa, synthetic construct; identical to SEQ ID NO: 240

SEQ ID NO: 256 - protein, 486 aa, synthetic construct; identical to SEQ ID NO: 238

SEQ ID NO: 257 - protein, 214 aa, synthetic construct; identical to SEQ ID NO: 242

SEQ ID NO: 258 - protein, 446 aa, synthetic construct; identical to SEQ ID NO: 186

SEQ ID NO: 259 - protein, 482 aa, synthetic construct
QVQLVQSGAEVKKPGASVKVSCKVSGFSVTSYNVHWVRQAPGQGLEWMGVMWSGGNTDYNSKFQGRVTMTRDTSTNTVYMELSSLRSEDTAVYYCARAGRYYHDSNYYWDFPYWGQGTLVTVSSGKPGSGKPGSGKPGSGKPGSDIQMTQSPSSVSASVGDRVTITCRASEDIYSGLAWYQQKPGKSPKLLIYGASSLQDGVPSRFSGSGSGTDYTLTISSLQPEDFATYFCQEGLKSPYTFGAGTKLEIKEPKSSDKTHTCPPCPAPPVAGPSVFLFPPKPKDTLMISRTPEVTCVVVDVKHEDPEVKFNWYVDGVEVHNAKTKPREEQYNSTYRVVSVLTVLHQDWLNGKEYKCKVSNKALPAPIEKTISKAKGQPREPQVYTLPPSREQMTKNQVKLTCLVKGFYPSDIAVEWESNGQPENNYKTTPPVLDSDGSFFLYSKLTVDKSRWQQGNVFSCSVLHEALHSHYTQKSLSLSPGK

SEQ ID NO: 260 - protein, 217 aa, synthetic construct; identical to SEQ ID NO: 188

SEQ ID NO: 261 - protein, 449 aa, synthetic construct; identical to SEQ ID NO: 189

SEQ ID NO: 262 - protein, 482 aa, synthetic construct; identical to SEQ ID NO: 259

SEQ ID NO: 263 - protein, 214 aa, synthetic construct; identical to SEQ ID NO: 178

SEQ ID NO: 264 - protein, 445 aa, synthetic construct; identical to SEQ ID NO: 192

SEQ ID NO: 265 - protein, 482 aa, synthetic construct; identical to SEQ ID NO: 259

SEQ ID NO: 266 - protein, 214 aa, synthetic construct; identical to SEQ ID NO: 194

SEQ ID NO: 267 - protein, 444 aa, synthetic construct; identical to SEQ ID NO: 195

SEQ ID NO: 268 - protein, 482 aa, synthetic construct; identical to SEQ ID NO: 259

SEQ ID NO: 269 - protein, 214 aa, synthetic construct; identical to SEQ ID NO: 197

SEQ ID NO: 270 - protein, 453 aa, synthetic construct; identical to SEQ ID NO: 198

SEQ ID NO: 271 - protein, 482 aa, synthetic construct; identical to SEQ ID NO: 259

SEQ ID NO: 272 - protein, 217 aa, synthetic construct; identical to SEQ ID NO: 200

SEQ ID NO: 273 - protein, 452 aa, synthetic construct; identical to SEQ ID NO: 201

SEQ ID NO: 274 - protein, 482 aa, synthetic construct; identical to SEQ ID NO: 259

SEQ ID NO: 275 - protein, 218 aa, synthetic construct; identical to SEQ ID NO: 203

SEQ ID NO: 276 - protein, 453 aa, synthetic construct
QVQLVQSGAEVKKPGASVKVSCKVSGFSVTSYNVHWVRQAPGQGLEWMGVMWSGGNTDYNSKFQGRVTMTRDTSTNTVYMELSSLRSEDTAVYYCARAGRYYHDSNYYWDFPYWGQGTLVTVSSASTKGPSVFPLAPSSKSTSGGTAALGCLVKDYFPEPVTVSWNSGALTSGVHTFPAVLQSSGLYSLSSVVTVPSSSLGTQTYICNVNHKPSDTKVDKKVEPKSCDKTHTCPPCPAPPVAGPSVFLFPPKPKDTLMISRTPEVTCVVVDVKHEDPEVKFNWYVDGVEVHNAKTKPREEEYNSTYRVVSVLTVLHQDWLNGKEYKCKVSNKALPAPIEKTISKAKGQPREPQVYTLPPSREEMTKNQVSLTCDVSGFYPSDIAVEWESDGQPENNYKTTPPVLDSDGSFFLYSKLTVDKSRWEQGDVFSCSVLHEALHSHYTQKSLSLSPGK

SEQ ID NO: 277 - protein, 479 aa, synthetic construct; identical to SEQ ID NO: 223

SEQ ID NO: 278 - protein, 214 aa, synthetic construct
DIQMTQSPSSVSASVGDRVTITCRASEDIYSGLAWYQQKPGKSPKLLIYGASSLQDGVPSRFSGSGSGTDYTLTISSLQPEDFATYFCQEGLKSPYTFGAGTKLEIKRTVAAPSVFIFPPSDEQLKSGTASVVCLLNNFYPREAKVQWKVDNALQSGNSQESVTEQDSKDSTYSLSSTLTLSKADYEKHKVYACEVTHQGLSSPVTKSFNRGEC

SEQ ID NO: 279 - protein, 453 aa, synthetic construct; identical to SEQ ID NO: 276

SEQ ID NO: 280 - protein, 478 aa, synthetic construct; identical to SEQ ID NO: 226

SEQ ID NO: 281 - protein, 214 aa, synthetic construct; identical to SEQ ID NO: 278

SEQ ID NO: 282 - protein, 453 aa, synthetic construct; identical to SEQ ID NO: 276

SEQ ID NO: 283 - protein, 474 aa, synthetic construct; identical to SEQ ID NO: 229

SEQ ID NO: 284 - protein, 214 aa, synthetic construct; identical to SEQ ID NO: 278

SEQ ID NO: 285 - protein, 453 aa, synthetic construct; identical to SEQ ID NO: 276

SEQ ID NO: 286 - protein, 473 aa, synthetic construct; identical to SEQ ID NO: 232

SEQ ID NO: 287 - protein, 214 aa, synthetic construct; identical to SEQ ID NO: 278

SEQ ID NO: 288 - protein, 453 aa, synthetic construct; identical to SEQ ID NO: 276

SEQ ID NO: 289 - protein, 486 aa, synthetic construct; identical to SEQ ID NO: 235

SEQ ID NO: 290 - protein, 214 aa, synthetic construct; identical to SEQ ID NO: 278

SEQ ID NO: 291 - protein, 453 aa, synthetic construct; identical to SEQ ID NO: 276

SEQ ID NO: 292 - protein, 486 aa, synthetic construct; identical to SEQ ID NO: 238

SEQ ID NO: 293 - protein, 214 aa, synthetic construct; identical to SEQ ID NO: 278

SEQ ID NO: 294 - protein, 449 aa, synthetic construct; identical to SEQ ID NO: 189

SEQ ID NO: 295 - protein, 482 aa, synthetic construct
QVQLVQSGAEVKKPGASVKVSCKVSGFSVTSYNVHWVRQAPGQCLEWMGVMWSGGNTDYNSKFQGRVTMTRDTSTNTVYMELSSLRSEDTAVYYCARAGRYYHDSNYYWDFPYWGQGTLVTVSSGKPGSGKPGSGKPGSGKPGSDIQMTQSPSSVSASVGDRVTITCRASEDIYSGLAWYQQKPGKSPKLLIYGASSLQDGVPSRFSGSGSGTDYTLTISSLQPEDFATYFCQEGLKSPYTFGCGTKLEIKEPKSSDKTHTCPPCPAPPVAGPSVFLFPPKPKDTLMISRTPEVTCVVVDVKHEDPEVKFNWYVDGVEVHNAKTKPREEQYNSTYRVVSVLTVLHQDWLNGKEYKCKVSNKALPAPIEKTISKAKGQPREPQVYTLPPSREQMTKNQVKLTCLVKGFYPSDIAVEWESNGQPENNYKTTPPVLDSDGSFFLYSKLTVDKSRWQQGNVFSCSVLHEALHSHYTQKSLSLSPGK

SEQ ID NO: 296 - protein, 214 aa, synthetic construct; identical to SEQ ID NO: 178

SEQ ID NO: 297 - protein, 449 aa, synthetic construct; identical to SEQ ID NO: 189

SEQ ID NO: 298 - protein, 472 aa, synthetic construct
EVQLVESGGGLVQPGGSLKLSCAASGFDIIDDYIHWVRQASGKCLEWVGRIDPASANTKYVPSVKGRFTISADTSKNTAYLQMNSLKTEDTAVYYCTRKGFAYWGQGTLVTVSSGKPGSGKPGSGKPGSGKPGSNIVMTQTPLSLSVTPGQPASISCKASENVGTYVSWYLQKPGQSPQLLIYGTSNRYTGVPDRFTGSGSATDFTLKISRVEAEDVGVYHCGQSYRYPYTFGCGTKLEIKEPKSSDKTHTCPPCPAPPVAGPSVFLFPPKPKDTLMISRTPEVTCVVVDVKHEDPEVKFNWYVDGVEVHNAKTKPREEQYNSTYRVVSVLTVLHQDWLNGKEYKCKVSNKALPAPIEKTISKAKGQPREPQVYTLPPSREQMTKNQVKLTCLVKGFYPSDIAVEWESNGQPENNYKTTPPVLDSDGSFFLYSKLTVDKSRWQQGNVFSCSVLHEALHSHYTQKSLSLSPGK

SEQ ID NO: 299 - protein, 214 aa, synthetic construct; identical to SEQ ID NO: 178

SEQ ID NO: 300 - protein, 449 aa, synthetic construct; identical to SEQ ID NO: 189

SEQ ID NO: 301 - protein, 477 aa, synthetic construct
EVQLVESGGGLVQPGGSLRLSCAASGFTFSSFGMHWVRQAPGKCLEWVSYISSGSTTIYYADSVKGRFTISRDNAKNSLYLQMNSLRAEDTAVYYCARAPLLRGAMDYWGQGTLVTVSSGKPGSGKPGSGKPGSGKPGSDIVMTQSPDSLAVSLGERATINCKASQDVSTAVVWYQQKPGQSPKLLIYWASTRHTGVPDRFTGSGSGTDYTLTISSLQAEDVAVYHCQQHYSTPYTFGCGTKLEIKEPKSSDKTHTCPPCPAPPVAGPSVFLFPPKPKDTLMISRTPEVTCVVVDVKHEDPEVKFNWYVDGVEVHNAKTKPREEQYNSTYRVVSVLTVLHQDWLNGKEYKCKVSNKALPAPIEKTISKAKGQPREPQVYTLPPSREQMTKNQVKLTCLVKGFYPSDIAVEWESNGQPENNYKTTPPVLDSDGSFFLYSKLTVDKSRWQQGNVFSCSVLHEALHSHYTQKSLSLSPGK

SEQ ID NO: 302 - protein, 214 aa, synthetic construct; identical to SEQ ID NO: 178

SEQ ID NO: 303 - protein, 449 aa, synthetic construct
QVQLVQSGAEVKKPGSSVKVSCKASGYTFTDQTIHWMRQAPGQGLEWIGYIYPRDDSPKYNENFKGKVTITADKSTSTAYMELSSLRSEDTAVYYCAIPDRSGYAWFIYWGQGTLVTVSSASTKGPSVFPLAPSSKSTSGGTAALGCLVKDYFPEPVTVSWNSGALTSGVHTFPAVLQSSGLYSLSSVVTVPSSSLGTQTYICNVNHKPSDTKVDKKVEPKSCDKTHTCPPCPAPPVAGPSVFLFPPKPKDTLMISRTPEVTCVVVDVKHEDPEVKFNWYVDGVEVHNAKTKPREEEYNSTYRVVSVLTVLHQDWLNGKEYKCKVSNKALPAPIEKTISKAKGQPREPQVYTLPPSREEMTKNQVSLTCDVSGFYPSDIAVEWESDGQPENNYKTTPPVLDSDGSFFLYSKLTVDKSRWEQGDVFSCSVMHEALHNHYTQKSLSLSPGK

SEQ ID NO: 304 - protein, 482 aa, synthetic construct
QVQLVQSGAEVKKPGASVKVSCKVSGFSVTSYNVHWVRQAPGQCLEWMGVMWSGGNTDYNSKFQGRVTMTRDTSTNTVYMELSSLRSEDTAVYYCARAGRYYHDSNYYWDFPYWGQGTLVTVSSGKPGSGKPGSGKPGSGKPGSDIQMTQSPSSVSASVGDRVTITCRASEDIYSGLAWYQQKPGKSPKLLIYGASSLQDGVPSRFSGSGSGTDYTLTISSLQPEDFATYFCQEGLKSPYTFGCGTKLEIKEPKSSDKTHTCPPCPAPPVAGPSVFLFPPKPKDTLMISRTPEVTCVVVDVKHEDPEVKFNWYVDGVEVHNAKTKPREEQYNSTYRVVSVLTVLHQDWLNGKEYKCKVSNKALPAPIEKTISKAKGQPREPQVYTLPPSREQMTKNQVKLTCLVKGFYPSDIAVEWESNGQPENNYKTTPPVLDSDGSFFLYSKLTVDKSRWQQGNVFSCSVMHEALHNHYTQKSLSLSPGK

SEQ ID NO: 305 - protein, 214 aa, synthetic construct; identical to SEQ ID NO: 178

SEQ ID NO: 306 - protein, 449 aa, synthetic construct; identical to SEQ ID NO: 303

SEQ ID NO: 307 - protein, 472 aa, synthetic construct
EVQLVESGGGLVQPGGSLKLSCAASGFDIIDDYIHWVRQASGKCLEWVGRIDPASANTKYVPSVKGRFTISADTSKNTAYLQMNSLKTEDTAVYYCTRKGFAYWGQGTLVTVSSGKPGSGKPGSGKPGSGKPGSNIVMTQTPLSLSVTPGQPASISCKASENVGTYVSWYLQKPGQSPQLLIYGTSNRYTGVPDRFTGSGSATDFTLKISRVEAEDVGVYHCGQSYRYPYTFGCGTKLEIKEPKSSDKTHTCPPCPAPPVAGPSVFLFPPKPKDTLMISRTPEVTCVVVDVKHEDPEVKFNWYVDGVEVHNAKTKPREEQYNSTYRVVSVLTVLHQDWLNGKEYKCKVSNKALPAPIEKTISKAKGQPREPQVYTLPPSREQMTKNQVKLTCLVKGFYPSDIAVEWESNGQPENNYKTTPPVLDSDGSFFLYSKLTVDKSRWQQGNVFSCSVMHEALHNHYTQKSLSLSPGK

SEQ ID NO: 308 - protein, 214 aa, synthetic construct; identical to SEQ ID NO: 178

SEQ ID NO: 309 - protein, 449 aa, synthetic construct; identical to SEQ ID NO: 303

SEQ ID NO: 310 - protein, 477 aa, synthetic construct
EVQLVESGGGLVQPGGSLRLSCAASGFTFSSFGMHWVRQAPGKCLEWVSYISSGSTTIYYADSVKGRFTISRDNAKNSLYLQMNSLRAEDTAVYYCARAPLLRGAMDYWGQGTLVTVSSGKPGSGKPGSGKPGSGKPGSDIVMTQSPDSLAVSLGERATINCKASQDVSTAVVWYQQKPGQSPKLLIYWASTRHTGVPDRFTGSGSGTDYTLTISSLQAEDVAVYHCQQHYSTPYTFGCGTKLEIKEPKSSDKTHTCPPCPAPPVAGPSVFLFPPKPKDTLMISRTPEVTCVVVDVKHEDPEVKFNWYVDGVEVHNAKTKPREEQYNSTYRVVSVLTVLHQDWLNGKEYKCKVSNKALPAPIEKTISKAKGQPREPQVYTLPPSREQMTKNQVKLTCLVKGFYPSDIAVEWESNGQPENNYKTTPPVLDSDGSFFLYSKLTVDKSRWQQGNVFSCSVMHEALHNHYTQKSLSLSPGK

SEQ ID NO: 311 - protein, 214 aa, synthetic construct; identical to SEQ ID NO: 178

SEQ ID NO: 312 - protein, 450 aa, synthetic construct
QVQLVQSGAEVKKPGSSVKVSCKASGYTFTDQTIHWMRQAPGQGLEWIGYIYPRDDSPKYNENFKGKVTITADKSTSTAYMELSSLRSEDTAVYYCAIPDRSGYAWFIYWGQGTLVTVSSASTKGPSVFPLAPSSKSTSGGTAALGCLVKDYFPEPVTVSWNSGALTSGVHTFPAVLQSSGLYSLSSVVTVPSSSLGTQTYICNVNHKPSDTKVDKKVEPKSCDKTHTCPPCPAPEAAGGPSVFLFPPKPKDTLMISRTPEVTCVVVDVSHEDPEVKFNWYVDGVEVHNAKTKPREEEYNSTYRVVSVLTVLHQDWLNGKEYKCKVSNKALAAPIEKTISKAKGQPREPQVYTLPPSREEMTKNQVSLTCDVSGFYPSDIAVEWESDGQPENNYKTTPPVLDSDGSFFLYSKLTVDKSRWEQGDVFSCSVLHEALHSHYTQKSLSLSPGK

SEQ ID NO: 313 - protein, 483 aa, synthetic construct
QVQLVQSGAEVKKPGASVKVSCKVSGFSVTSYNVHWVRQAPGQCLEWMGVMWSGGNTDYNSKFQGRVTMTRDTSTNTVYMELSSLRSEDTAVYYCARAGRYYHDSNYYWDFPYWGQGTLVTVSSGKPGSGKPGSGKPGSGKPGSDIQMTQSPSSVSASVGDRVTITCRASEDIYSGLAWYQQKPGKSPKLLIYGASSLQDGVPSRFSGSGSGTDYTLTISSLQPEDFATYFCQEGLKSPYTFGCGTKLEIKEPKSSDKTHTCPPCPAPEAAGGPSVFLFPPKPKDTLMISRTPEVTCVVVDVSHEDPEVKFNWYVDGVEVHNAKTKPREEQYNSTYRVVSVLTVLHQDWLNGKEYKCKVSNKALAAPIEKTISKAKGQPREPQVYTLPPSREQMTKNQVKLTCLVKGFYPSDIAVEWESNGQPENNYKTTPPVLDSDGSFFLYSKLTVDKSRWQQGNVFSCSVLHEALHSHYTQKSLSLSPGK

SEQ ID NO: 314 - protein, 214 aa, synthetic construct; identical to SEQ ID NO: 178

SEQ ID NO: 315 - protein, 448 aa, synthetic construct
QVQLVQSGAEVKKPGASVKVSCKASGYTFTSYDINWVRQAPGQGLEWMGWLNPNSGYTGYAQKFQGRVTMTADRSTSTAYMELSSLRSEDTAVYYCAREVPETAAFEYWGQGTLVTVSSASTKGPSVFPLAPSSKSTSGGTAALGCLVKDYFPEPVTVSWNSGALTSGVHTFPAVLQSSGLYSLSSVVTVPSSSLGTQTYICNVNHKPSDTKVDKKVEPKSCDKTHTCPPCPAPPVAGPSVFLFPPKPKDTLMISRTPEVTCVVVDVKHEDPEVKFNWYVDGVEVHNAKTKPREEEYNSTYRVVSVLTVLHQDWLNGKEYKCKVSNKALPAPIEKTISKAKGQPREPQVYTLPPSREEMTKNQVSLTCDVSGFYPSDIAVEWESDGQPENNYKTTPPVLDSDGSFFLYSKLTVDKSRWEQGDVFSCSVMHEALHNHYTQKSLSLSPGK

SEQ ID NO: 316 - protein, 478 aa, synthetic construct; identical to SEQ ID NO: 226

SEQ ID NO: 317 - protein, 216 aa, synthetic construct
QSVLTQPPSVSGAPGQRVTISCTSSSSDIGAGLGVHWYQQLPGTAPKLLIEGYYNRPSGVPDRFSGSKSGTSASLTITGLLPEDEGDYYCQSWDGTLSALFGGGTKLTVLGQPKAAPSVTLFPPSSEELQANKATLVCLISDFYPGAVTVAWKADSSPVKAGVETTTPSKQSNNKYAASSYLSLTPEQWKSHRSYSCQVTHEGSTVEKTVAPTECS

SEQ ID NO: 318 - protein, 449 aa, synthetic construct; identical to SEQ ID NO: 303

SEQ ID NO: 319 - protein, 480 aa, synthetic construct
QVQLVQSGAEVKKPGASVKVSCKASGYTFTSYDINWVRQAPGQGLEWMGWLNPNSGYTGYAQKFQGRVTMTADRSTSTAYMELSSLRSEDTAVYYCAREVPETAAFEYWGQGTLVTVSSGKPGSGKPGSGKPGSGKPGSQSVLTQPPSVSGAPGQRVTISCTSSSSDIGAGLGVHWYQQLPGTAPKLLIEGYYNRPSGVPDRFSGSKSGTSASLTITGLLPEDEGDYYCQSWDGTLSALFGGGTKLTVLEPKSSDKTHTCPPCPAPPVAGPSVFLFPPKPKDTLMISRTPEVTCVVVDVKHEDPEVKFNWYVDGVEVHNAKTKPREEQYNSTYRVVSVLTVLHQDWLNGKEYKCKVSNKALPAPIEKTISKAKGQPREPQVYTLPPSREQMTKNQVKLTCLVKGFYPSDIAVEWESNGQPENNYKTTPPVLDSDGSFFLYSKLTVDKSRWQQGNVFSCSVMHEALHNHYTQKSLSLSPGK

SEQ ID NO: 320 - protein, 214 aa, synthetic construct; identical to SEQ ID NO: 178

SEQ ID NO: 321 - protein, 449 aa, synthetic construct; identical to SEQ ID NO: 189

SEQ ID NO: 322 - protein, 482 aa, synthetic construct
QVQLVQSGAEVKKPGASVKVSCKVSGFSVTSYNVHWVRQAPGQCLEWMGVMWSGGNTDYNDKFQGRVTMTRDTSTNTVYMELSSLRSEDTAVYYCARAGRYYHDSNYYWDFPYWGQGTLVTVSSGKPGSGKPGSGKPGSGKPGSDIQMTQSPSSVSASVGDRVTITCRASEDIYSGLAWYQQKPGKSPKLLIYGASSLQDGVPSRFSGSGSGTDYTLTISSLQPEDFATYFCQEGLKSPYTFGCGTKLEIKEPKSSDKTHTCPPCPAPPVAGPSVFLFPPKPKDTLMISRTPEVTCVVVDVKHEDPEVKFNWYVDGVEVHNAKTKPREEQYNSTYRVVSVLTVLHQDWLNGKEYKCKVSNKALPAPIEKTISKAKGQPREPQVYTLPPSREQMTKNQVKLTCLVKGFYPSDIAVEWESNGQPENNYKTTPPVLDSDGSFFLYSKLTVDKSRWQQGNVFSCSVLHEALHSHYTQKSLSLSPGK

SEQ ID NO: 323 - protein, 214 aa, synthetic construct; identical to SEQ ID NO: 178

SEQ ID NO: 324 - protein, 453 aa, synthetic construct; identical to SEQ ID NO: 276

SEQ ID NO: 325 - protein, 478 aa, synthetic construct; identical to SEQ ID NO: 226

SEQ ID NO: 326 - protein, 214 aa, synthetic construct
DIQMTQSPSSVSASVGDRVTITCRASEDIYSGLAWYQQKPGKSPKLLIYGASSLQDGVPSRFSGSGSGTDYTLTISSLQPEDFATYFCQEGLSSPYTFGAGTKLEIKRTVAAPSVFIFPPSDEQLKSGTASVVCLLNNFYPREAKVQWKVDNALQSGNSQESVTEQDSKDSTYSLSSTLTLSKADYEKHKVYACEVTHQGLSSPVTKSFNRGEC

SEQ ID NO: 327 - protein, 453 aa, synthetic construct; identical to SEQ ID NO: 276

SEQ ID NO: 328 - protein, 478 aa, synthetic construct; identical to SEQ ID NO: 226

SEQ ID NO: 329 - protein, 214 aa, synthetic construct
DIQMTQSPSSVSASVGDRVTITCRASEDIYSGLAWYQQKPGKSPKLLIYGASSLQDGVPSRFSGSGSGTDYTLTISSLQPEDFATYFCQEGLKFPYTFGAGTKLEIKRTVAAPSVFIFPPSDEQLKSGTASVVCLLNNFYPREAKVQWKVDNALQSGNSQESVTEQDSKDSTYSLSSTLTLSKADYEKHKVYACEVTHQGLSSPVTKSFNRGEC

SEQ ID NO: 330 - protein, 453 aa, synthetic construct; identical to SEQ ID NO: 276

SEQ ID NO: 331 - protein, 478 aa, synthetic construct; identical to SEQ ID NO: 226

SEQ ID NO: 332 - protein, 214 aa, synthetic construct
DIQMTQSPSSVSASVGDRVTITCRASEDIYSGLAWYQQKPGKSPKLLIYGASSLQDGVPSRFSGSGSGTDYTLTISSLQPEDFATYFCQEGLKSPYTFGQGTKLEIKRTVAAPSVFIFPPSDEQLKSGTASVVCLLNNFYPREAKVQWKVDNALQSGNSQESVTEQDSKDSTYSLSSTLTLSKADYEKHKVYACEVTHQGLSSPVTKSFNRGEC

SEQ ID NO: 333 - protein, 453 aa, synthetic construct
QVQLVQSGAEVKKPGASVKVSCKVSGFYVWSYNVHWVRQAPGQGLEWMGVMWKGANTDYNSKFQGRVTMTRDTSTNTVYMELSSLRSEDTAVYYCARAGRYYHDSNYYWDFPYWGQGTLVTVSSASTKGPSVFPLAPSSKSTSGGTAALGCLVKDYFPEPVTVSWNSGALTSGVHTFPAVLQSSGLYSLSSVVTVPSSSLGTQTYICNVNHKPSDTKVDKKVEPKSCDKTHTCPPCPAPPVAGPSVFLFPPKPKDTLMISRTPEVTCVVVDVKHEDPEVKFNWYVDGVEVHNAKTKPREEEYNSTYRVVSVLTVLHQDWLNGKEYKCKVSNKALPAPIEKTISKAKGQPREPQVYTLPPSREEMTKNQVSLTCDVSGFYPSDIAVEWESDGQPENNYKTTPPVLDSDGSFFLYSKLTVDKSRWEQGDVFSCSVLHEALHSHYTQKSLSLSPGK

SEQ ID NO: 334 - protein, 478 aa, synthetic construct; identical to SEQ ID NO: 226

SEQ ID NO: 335 - protein, 214 aa, synthetic construct; identical to SEQ ID NO: 278

SEQ ID NO: 336 - protein, 453 aa, synthetic construct; identical to SEQ ID NO: 333

SEQ ID NO: 337 - protein, 478 aa, synthetic construct; identical to SEQ ID NO: 226

SEQ ID NO: 338 - protein, 214 aa, synthetic construct; identical to SEQ ID NO: 326

SEQ ID NO: 339 - protein, 453 aa, synthetic construct; identical to SEQ ID NO: 333

SEQ ID NO: 340 - protein, 478 aa, synthetic construct; identical to SEQ ID NO: 226

SEQ ID NO: 341 - protein, 214 aa, synthetic construct; identical to SEQ ID NO: 329

SEQ ID NO: 342 - protein, 453 aa, synthetic construct; identical to SEQ ID NO: 333

SEQ ID NO: 343 - protein, 478 aa, synthetic construct; identical to SEQ ID NO: 226

SEQ ID NO: 344 - protein, 214 aa, synthetic construct; identical to SEQ ID NO: 332

SEQ ID NO: 345 - protein, 453 aa, synthetic construct
QVQLVQSGAEVKKPGASVKVSCKVSGFSVTSYNVHWVRQAPGQGLEWMGVMASGGNTDYNSKFQGRVTMTRDTSTNTVYMELSSLRSEDTAVYYCARAGRYYHRSNYYWDFPYWGQGTLVTVSSASTKGPSVFPLAPSSKSTSGGTAALGCLVKDYFPEPVTVSWNSGALTSGVHTFPAVLQSSGLYSLSSVVTVPSSSLGTQTYICNVNHKPSDTKVDKKVEPKSCDKTHTCPPCPAPPVAGPSVFLFPPKPKDTLMISRTPEVTCVVVDVKHEDPEVKFNWYVDGVEVHNAKTKPREEEYNSTYRVVSVLTVLHQDWLNGKEYKCKVSNKALPAPIEKTISKAKGQPREPQVYTLPPSREEMTKNQVSLTCDVSGFYPSDIAVEWESDGQPENNYKTTPPVLDSDGSFFLYSKLTVDKSRWEQGDVFSCSVLHEALHSHYTQKSLSLSPGK

SEQ ID NO: 346 - protein, 478 aa, synthetic construct; identical to SEQ ID NO: 226

SEQ ID NO: 347 - protein, 214 aa, synthetic construct; identical to SEQ ID NO: 278

SEQ ID NO: 348 - protein, 453 aa, synthetic construct; identical to SEQ ID NO: 345

SEQ ID NO: 349 - protein, 478 aa, synthetic construct; identical to SEQ ID NO: 226

SEQ ID NO: 350 - protein, 214 aa, synthetic construct; identical to SEQ ID NO: 326

SEQ ID NO: 351 - protein, 453 aa, synthetic construct; identical to SEQ ID NO: 345

SEQ ID NO: 352 - protein, 478 aa, synthetic construct; identical to SEQ ID NO: 226

SEQ ID NO: 353 - protein, 214 aa, synthetic construct; identical to SEQ ID NO: 329

SEQ ID NO: 354 - protein, 453 aa, synthetic construct; identical to SEQ ID NO: 345

SEQ ID NO: 355 - protein, 478 aa, synthetic construct; identical to SEQ ID NO: 226

SEQ ID NO: 356 - protein, 214 aa, synthetic construct; identical to SEQ ID NO: 332

SEQ ID NO: 357 - protein, 453 aa, synthetic construct
QVQLVQSGAEVKKPGASVKVSCKVSGFSVLSYNVHWVRQAPGQGLEWMGVMWSKGNTDYNSKFQGRVTMTRDTSTNTVYMELSSLRSEDTAVYYCARAGRYYHDSNYYWDFPYWGQGTLVTVSSASTKGPSVFPLAPSSKSTSGGTAALGCLVKDYFPEPVTVSWNSGALTSGVHTFPAVLQSSGLYSLSSVVTVPSSSLGTQTYICNVNHKPSDTKVDKKVEPKSCDKTHTCPPCPAPPVAGPSVFLFPPKPKDTLMISRTPEVTCVVVDVKHEDPEVKFNWYVDGVEVHNAKTKPREEEYNSTYRVVSVLTVLHQDWLNGKEYKCKVSNKALPAPIEKTISKAKGQPREPQVYTLPPSREEMTKNQVSLTCDVSGFYPSDIAVEWESDGQPENNYKTTPPVLDSDGSFFLYSKLTVDKSRWEQGDVFSCSVLHEALHSHYTQKSLSLSPGK

SEQ ID NO: 358 - protein, 478 aa, synthetic construct; identical to SEQ ID NO: 226

SEQ ID NO: 359 - protein, 214 aa, synthetic construct; identical to SEQ ID NO: 278

SEQ ID NO: 360 - protein, 453 aa, synthetic construct; identical to SEQ ID NO: 357

SEQ ID NO: 361 - protein, 478 aa, synthetic construct; identical to SEQ ID NO: 226

SEQ ID NO: 362 - protein, 214 aa, synthetic construct; identical to SEQ ID NO: 326

SEQ ID NO: 363 - protein, 453 aa, synthetic construct; identical to SEQ ID NO: 357

SEQ ID NO: 364 - protein, 478 aa, synthetic construct; identical to SEQ ID NO: 226

SEQ ID NO: 365 - protein, 214 aa, synthetic construct; identical to SEQ ID NO: 329

SEQ ID NO: 366 - protein, 453 aa, synthetic construct; identical to SEQ ID NO: 357

SEQ ID NO: 367 - protein, 478 aa, synthetic construct; identical to SEQ ID NO: 226

SEQ ID NO: 368 - protein, 214 aa, synthetic construct; identical to SEQ ID NO: 332

SEQ ID NO: 369 - protein, 453 aa, synthetic construct
QVQLVQSGAEVKKPGASVKVSCKVSGFSVTSYPVHWVRQAPGQGLEWMGVMWSGGKTDYNSKFQGRVTMTRDTSTNTVYMELSSLRSEDTAVYYCARAGRYYHDSNYYWDFPYWGQGTLVTVSSASTKGPSVFPLAPSSKSTSGGTAALGCLVKDYFPEPVTVSWNSGALTSGVHTFPAVLQSSGLYSLSSVVTVPSSSLGTQTYICNVNHKPSDTKVDKKVEPKSCDKTHTCPPCPAPPVAGPSVFLFPPKPKDTLMISRTPEVTCVVVDVKHEDPEVKFNWYVDGVEVHNAKTKPREEEYNSTYRVVSVLTVLHQDWLNGKEYKCKVSNKALPAPIEKTISKAKGQPREPQVYTLPPSREEMTKNQVSLTCDVSGFYPSDIAVEWESDGQPENNYKTTPPVLDSDGSFFLYSKLTVDKSRWEQGDVFSCSVLHEALHSHYTQKSLSLSPGK

SEQ ID NO: 370 - protein, 478 aa, synthetic construct; identical to SEQ ID NO: 226

SEQ ID NO: 371 - protein, 214 aa, synthetic construct; identical to SEQ ID NO: 278

SEQ ID NO: 372 - protein, 453 aa, synthetic construct; identical to SEQ ID NO: 369

SEQ ID NO: 373 - protein, 478 aa, synthetic construct; identical to SEQ ID NO: 226

SEQ ID NO: 374 - protein, 214 aa, synthetic construct; identical to SEQ ID NO: 326

SEQ ID NO: 375 - protein, 453 aa, synthetic construct; identical to SEQ ID NO: 369

SEQ ID NO: 376 - protein, 478 aa, synthetic construct; identical to SEQ ID NO: 226

SEQ ID NO: 377 - protein, 214 aa, synthetic construct; identical to SEQ ID NO: 329

SEQ ID NO: 378 - protein, 453 aa, synthetic construct; identical to SEQ ID NO: 369

SEQ ID NO: 379 - protein, 478 aa, synthetic construct; identical to SEQ ID NO: 226

SEQ ID NO: 380 - protein, 214 aa, synthetic construct; identical to SEQ ID NO: 332

SEQ ID NO: 381 - protein, 453 aa, synthetic construct
QVQLVQSGAEVKKPGASVKVSCKVSGFSVTSQNVHWVRQAPGQGLEWMGVMASGGNTDYNSKFQGRVTMTRDTSTNTVYMELSSLRSEDTAVYYCARAGRYYHDSNYYWDFPYWGQGTLVTVSSASTKGPSVFPLAPSSKSTSGGTAALGCLVKDYFPEPVTVSWNSGALTSGVHTFPAVLQSSGLYSLSSVVTVPSSSLGTQTYICNVNHKPSDTKVDKKVEPKSCDKTHTCPPCPAPPVAGPSVFLFPPKPKDTLMISRTPEVTCVVVDVKHEDPEVKFNWYVDGVEVHNAKTKPREEEYNSTYRVVSVLTVLHQDWLNGKEYKCKVSNKALPAPIEKTISKAKGQPREPQVYTLPPSREEMTKNQVSLTCDVSGFYPSDIAVEWESDGQPENNYKTTPPVLDSDGSFFLYSKLTVDKSRWEQGDVFSCSVLHEALHSHYTQKSLSLSPGK

SEQ ID NO: 382 - protein, 478 aa, synthetic construct; identical to SEQ ID NO: 226

SEQ ID NO: 383 - protein, 214 aa, synthetic construct; identical to SEQ ID NO: 278

SEQ ID NO: 384 - protein, 453 aa, synthetic construct; identical to SEQ ID NO: 381

SEQ ID NO: 385 - protein, 478 aa, synthetic construct; identical to SEQ ID NO: 226

SEQ ID NO: 386 - protein, 214 aa, synthetic construct; identical to SEQ ID NO: 326

SEQ ID NO: 387 - protein, 453 aa, synthetic construct; identical to SEQ ID NO: 381

SEQ ID NO: 388 - protein, 478 aa, synthetic construct; identical to SEQ ID NO: 226

SEQ ID NO: 389 - protein, 214 aa, synthetic construct; identical to SEQ ID NO: 329

SEQ ID NO: 390 - protein, 453 aa, synthetic construct; identical to SEQ ID NO: 381

SEQ ID NO: 391 - protein, 478 aa, synthetic construct; identical to SEQ ID NO: 226

SEQ ID NO: 392 - protein, 214 aa, synthetic construct; identical to SEQ ID NO: 332

SEQ ID NO: 393 - protein, 453 aa, synthetic construct; identical to SEQ ID NO: 333

SEQ ID NO: 394 - protein, 478 aa, synthetic construct; identical to SEQ ID NO: 226

SEQ ID NO: 395 - protein, 214 aa, synthetic construct
DIQMTQSPSSVSASVGDRVTITCRASEDGYSGLAWYQQKPGKSPKLLIYGASSRQDGVPSRFSGSGSGTDYTLTISSLQPEDFATYFCQEGLKVPYTFGAGTKLEIKRTVAAPSVFIFPPSDEQLKSGTASVVCLLNNFYPREAKVQWKVDNALQSGNSQESVTEQDSKDSTYSLSSTLTLSKADYEKHKVYACEVTHQGLSSPVTKSFNRGEC

SEQ ID NO: 396 - protein, 453 aa, synthetic construct; identical to SEQ ID NO: 345

SEQ ID NO: 397 - protein, 478 aa, synthetic construct; identical to SEQ ID NO: 226

SEQ ID NO: 398 - protein, 214 aa, synthetic construct
DIQMTQSPSSVSASVGDRVTITCRASERIRSGLAWYQQKPGKSPKLLIYGASELFDGVPSRFSGSGSGTDYTLTISSLQPEDFATYFCQEGGRSPYTFGAGTKLEIKRTVAAPSVFIFPPSDEQLKSGTASVVCLLNNFYPREAKVQWKVDNALQSGNSQESVTEQDSKDSTYSLSSTLTLSKADYEKHKVYACEVTHQGLSSPVTKSFNRGEC

SEQ ID NO: 399 - protein, 453 aa, synthetic construct; identical to SEQ ID NO: 276

SEQ ID NO: 400 - protein, 478 aa, synthetic construct; identical to SEQ ID NO: 226

SEQ ID NO: 401 - protein, 214 aa, synthetic construct; identical to SEQ ID NO: 395

SEQ ID NO: 402 - protein, 449 aa, synthetic construct
QVQLVQSGAEVKKPGSSVKVSCKASGYTFTDQTIHWMRQAPGQGLEWMGYIYPRDDSPKYNEKFQGRVTITADKSTSTAYMELSSLRSEDTAVYYCAIPDRSGYAWFIYWGQGTLVTVSSASTKGPSVFPLAPSSKSTSGGTAALGCLVKDYFPEPVTVSWNSGALTSGVHTFPAVLQSSGLYSLSSVVTVPSSSLGTQTYICNVNHKPSDTKVDKKVEPKSCDKTHTCPPCPAPPVAGPSVFLFPPKPKDTLMISRTPEVTCVVVDVKHEDPEVKFNWYVDGVEVHNAKTKPREEEYNSTYRVVSVLTVLHQDWLNGKEYKCKVSNKALPAPIEKTISKAKGQPREPQVYTLPPSREEMTKNQVSLTCDVSGFYPSDIAVEWESDGQPENNYKTTPPVLDSDGSFFLYSKLTVDKSRWEQGDVFSCSVLHEALHSHYTQKSLSLSPGK

SEQ ID NO: 403 - protein, 482 aa, synthetic construct; identical to SEQ ID NO: 295

SEQ ID NO: 404 - protein, 214 aa, synthetic construct
DIQMTQSPSSLSASVGDRVTITCRASRDVAIAVAWYQQKPGKVPKLLIYWASTRHTGVPSRFSGSGSRTDFTLTISSLQPEDVATYFCHQYSSYPFTFGSGTKLEIKRTVAAPSVFIFPPSDEQLKSGTASVVCLLNNFYPREAKVQWKVDNALQSGNSQESVTEQDSKDSTYSLSSTLTLSKADYEKHKVYACEVTHQGLSSPVTKSFNRGEC

SEQ ID NO: 405 - protein, 449 aa, synthetic construct; identical to SEQ ID NO: 402

SEQ ID NO: 406 - protein, 482 aa, synthetic construct; identical to SEQ ID NO: 295

SEQ ID NO: 407 - protein, 214 aa, synthetic construct
DIQMTQSPSTLSASVGDRVTITCRASRDVAIAVAWYQQKPGKVPKLLIYWASTRHTGVPSRFSGSGSRTEFTLTISSLQPDDFATYFCHQYSSYPFTFGSGTKLEIKRTVAAPSVFIFPPSDEQLKSGTASVVCLLNNFYPREAKVQWKVDNALQSGNSQESVTEQDSKDSTYSLSSTLTLSKADYEKHKVYACEVTHQGLSSPVTKSFNRGEC

SEQ ID NO: 408 - protein, 453 aa, synthetic construct; identical to SEQ ID NO: 276

SEQ ID NO: 409 - protein, 478 aa, synthetic construct; identical to SEQ ID NO: 226

SEQ ID NO: 410 - protein, 214 aa, synthetic construct
DIQMTQSPSSVSASVGDRVTITCRASEDIYSGLAWYQQKPGKSPKLLIYGASSLQDGVPSRFSGSGSGTDYTLTISSLQPEDFATYFCQEGLSFPYTFGAGTKLEIKRTVAAPSVFIFPPSDEQLKSGTASVVCLLNNFYPREAKVQWKVDNALQSGNSQESVTEQDSKDSTYSLSSTLTLSKADYEKHKVYACEVTHQGLSSPVTKSFNRGEC

SEQ ID NO: 411 - protein, 453 aa, synthetic construct; identical to SEQ ID NO: 276

SEQ ID NO: 412 - protein, 478 aa, synthetic construct; identical to SEQ ID NO: 226

SEQ ID NO: 413 - protein, 214 aa, synthetic construct
DIQMTQSPSSVSASVGDRVTITCRASEDIYSGLAWYQQKPGKSPKLLIYGASSLQDGVPSRFSGSGSGTDYTLTISSLQPEDFATYFCQEGLSSPYTFGQGTKLEIKRTVAAPSVFIFPPSDEQLKSGTASVVCLLNNFYPREAKVQWKVDNALQSGNSQESVTEQDSKDSTYSLSSTLTLSKADYEKHKVYACEVTHQGLSSPVTKSFNRGEC

SEQ ID NO: 414 - protein, 453 aa, synthetic construct; identical to SEQ ID NO: 276

SEQ ID NO: 415 - protein, 478 aa, synthetic construct; identical to SEQ ID NO: 226

SEQ ID NO: 416 - protein, 214 aa, synthetic construct
DIQMTQSPSSVSASVGDRVTITCRASEDIYSGLAWYQQKPGKSPKLLIYGASSLQDGVPSRFSGSGSGTDYTLTISSLQPEDFATYFCQEGLKFPYTFGQGTKLEIKRTVAAPSVFIFPPSDEQLKSGTASVVCLLNNFYPREAKVQWKVDNALQSGNSQESVTEQDSKDSTYSLSSTLTLSKADYEKHKVYACEVTHQGLSSPVTKSFNRGEC

SEQ ID NO: 417 - protein, 453 aa, synthetic construct; identical to SEQ ID NO: 276

SEQ ID NO: 418 - protein, 478 aa, synthetic construct; identical to SEQ ID NO: 226

SEQ ID NO: 419 - protein, 214 aa, synthetic construct
DIQMTQSPSSVSASVGDRVTITCRASEDIYSGLAWYQQKPGKSPKLLIYGASSLQDGVPSRFSGSGSGTDYTLTISSLQPEDFATYFCQEGLSFPYTFGQGTKLEIKRTVAAPSVFIFPPSDEQLKSGTASVVCLLNNFYPREAKVQWKVDNALQSGNSQESVTEQDSKDSTYSLSSTLTLSKADYEKHKVYACEVTHQGLSSPVTKSFNRGEC

SEQ ID NO: 420 - protein, 453 aa, synthetic construct
QVQLVQSGAEVKKPGASVKVSCKVSGFSVTSYNVHWVRQAPGQGLEWMGVMWSSGNTDYNSKFQGRVTMTRDTSTNTVYMELSSLRSEDTAVYYCARAGRYYHDSNYYWDFPYWGQGTLVTVSSASTKGPSVFPLAPSSKSTSGGTAALGCLVKDYFPEPVTVSWNSGALTSGVHTFPAVLQSSGLYSLSSVVTVPSSSLGTQTYICNVNHKPSDTKVDKKVEPKSCDKTHTCPPCPAPPVAGPSVFLFPPKPKDTLMISRTPEVTCVVVDVKHEDPEVKFNWYVDGVEVHNAKTKPREEEYNSTYRVVSVLTVLHQDWLNGKEYKCKVSNKALPAPIEKTISKAKGQPREPQVYTLPPSREEMTKNQVSLTCDVSGFYPSDIAVEWESDGQPENNYKTTPPVLDSDGSFFLYSKLTVDKSRWEQGDVFSCSVLHEALHSHYTQKSLSLSPGK

SEQ ID NO: 421 - protein, 478 aa, synthetic construct; identical to SEQ ID NO: 226

SEQ ID NO: 422 - protein, 214 aa, synthetic construct; identical to SEQ ID NO: 278

SEQ ID NO: 423 - protein, 453 aa, synthetic construct; identical to SEQ ID NO: 420

SEQ ID NO: 424 - protein, 478 aa, synthetic construct; identical to SEQ ID NO: 226

SEQ ID NO: 425 - protein, 214 aa, synthetic construct; identical to SEQ ID NO: 326

SEQ ID NO: 426 - protein, 453 aa, synthetic construct; identical to SEQ ID NO: 420

SEQ ID NO: 427 - protein, 478 aa, synthetic construct; identical to SEQ ID NO: 226

SEQ ID NO: 428 - protein, 214 aa, synthetic construct; identical to SEQ ID NO: 329

SEQ ID NO: 429 - protein, 453 aa, synthetic construct; identical to SEQ ID NO: 420

SEQ ID NO: 430 - protein, 478 aa, synthetic construct; identical to SEQ ID NO: 226

SEQ ID NO: 431 - protein, 214 aa, synthetic construct; identical to SEQ ID NO: 332

SEQ ID NO: 432 - protein, 453 aa, synthetic construct; identical to SEQ ID NO: 420

SEQ ID NO: 433 - protein, 478 aa, synthetic construct; identical to SEQ ID NO: 226

SEQ ID NO: 434 - protein, 214 aa, synthetic construct; identical to SEQ ID NO: 410

SEQ ID NO: 435 - protein, 453 aa, synthetic construct; identical to SEQ ID NO: 420

SEQ ID NO: 436 - protein, 478 aa, synthetic construct; identical to SEQ ID NO: 226

SEQ ID NO: 437 - protein, 214 aa, synthetic construct; identical to SEQ ID NO: 413

SEQ ID NO: 438 - protein, 453 aa, synthetic construct; identical to SEQ ID NO: 420

SEQ ID NO: 439 - protein, 478 aa, synthetic construct; identical to SEQ ID NO: 226

SEQ ID NO: 440 - protein, 214 aa, synthetic construct; identical to SEQ ID NO: 416

SEQ ID NO: 441 - protein, 453 aa, synthetic construct; identical to SEQ ID NO: 420

SEQ ID NO: 442 - protein, 478 aa, synthetic construct; identical to SEQ ID NO: 226

SEQ ID NO: 443 - protein, 214 aa, synthetic construct; identical to SEQ ID NO: 419

SEQ ID NO: 444 - protein, 453 aa, synthetic construct; identical to SEQ ID NO: 333

SEQ ID NO: 445 - protein, 478 aa, synthetic construct; identical to SEQ ID NO: 226

SEQ ID NO: 446 - protein, 214 aa, synthetic construct; identical to SEQ ID NO: 410

SEQ ID NO: 447 - protein, 453 aa, synthetic construct; identical to SEQ ID NO: 333

SEQ ID NO: 448 - protein, 478 aa, synthetic construct; identical to SEQ ID NO: 226

SEQ ID NO: 449 - protein, 214 aa, synthetic construct; identical to SEQ ID NO: 413

SEQ ID NO: 450 - protein, 453 aa, synthetic construct; identical to SEQ ID NO: 333

SEQ ID NO: 451 - protein, 478 aa, synthetic construct; identical to SEQ ID NO: 226

SEQ ID NO: 452 - protein, 214 aa, synthetic construct; identical to SEQ ID NO: 416

SEQ ID NO: 453 - protein, 453 aa, synthetic construct; identical to SEQ ID NO: 333

SEQ ID NO: 454 - protein, 478 aa, synthetic construct; identical to SEQ ID NO: 226

SEQ ID NO: 455 - protein, 214 aa, synthetic construct; identical to SEQ ID NO: 419

SEQ ID NO: 456 - protein, 453 aa, synthetic construct
QVQLVQSGAEVKKPGASVKVSCKVSGFYVWSYNVHWVRQAPGQGLEWMGVMWKSANTDYNSKFQGRVTMTRDTSTNTVYMELSSLRSEDTAVYYCARAGRYYHDSNYYWDFPYWGQGTLVTVSSASTKGPSVFPLAPSSKSTSGGTAALGCLVKDYFPEPVTVSWNSGALTSGVHTFPAVLQSSGLYSLSSVVTVPSSSLGTQTYICNVNHKPSDTKVDKKVEPKSCDKTHTCPPCPAPPVAGPSVFLFPPKPKDTLMISRTPEVTCVVVDVKHEDPEVKFNWYVDGVEVHNAKTKPREEEYNSTYRVVSVLTVLHQDWLNGKEYKCKVSNKALPAPIEKTISKAKGQPREPQVYTLPPSREEMTKNQVSLTCDVSGFYPSDIAVEWESDGQPENNYKTTPPVLDSDGSFFLYSKLTVDKSRWEQGDVFSCSVLHEALHSHYTQKSLSLSPGK

SEQ ID NO: 457 - protein, 478 aa, synthetic construct; identical to SEQ ID NO: 226

SEQ ID NO: 458 - protein, 214 aa, synthetic construct; identical to SEQ ID NO: 395

SEQ ID NO: 459 - protein, 453 aa, synthetic construct; identical to SEQ ID NO: 456

SEQ ID NO: 460 - protein, 478 aa, synthetic construct; identical to SEQ ID NO: 226

SEQ ID NO: 461 - protein, 214 aa, synthetic construct; identical to SEQ ID NO: 326

SEQ ID NO: 462 - protein, 453 aa, synthetic construct; identical to SEQ ID NO: 456

SEQ ID NO: 463 - protein, 478 aa, synthetic construct; identical to SEQ ID NO: 226

SEQ ID NO: 464 - protein, 214 aa, synthetic construct; identical to SEQ ID NO: 329

SEQ ID NO: 465 - protein, 453 aa, synthetic construct; identical to SEQ ID NO: 456

SEQ ID NO: 466 - protein, 478 aa, synthetic construct; identical to SEQ ID NO: 226

SEQ ID NO: 467 - protein, 214 aa, synthetic construct; identical to SEQ ID NO: 332

SEQ ID NO: 468 - protein, 453 aa, synthetic construct; identical to SEQ ID NO: 456

SEQ ID NO: 469 - protein, 478 aa, synthetic construct; identical to SEQ ID NO: 226

SEQ ID NO: 470 - protein, 214 aa, synthetic construct; identical to SEQ ID NO: 410

SEQ ID NO: 471 - protein, 453 aa, synthetic construct; identical to SEQ ID NO: 456

SEQ ID NO: 472 - protein, 478 aa, synthetic construct; identical to SEQ ID NO: 226

SEQ ID NO: 473 - protein, 214 aa, synthetic construct; identical to SEQ ID NO: 413

SEQ ID NO: 474 - protein, 453 aa, synthetic construct; identical to SEQ ID NO: 456

SEQ ID NO: 475 - protein, 478 aa, synthetic construct; identical to SEQ ID NO: 226

SEQ ID NO: 476 - protein, 214 aa, synthetic construct; identical to SEQ ID NO: 416

SEQ ID NO: 477 - protein, 453 aa, synthetic construct; identical to SEQ ID NO: 456

SEQ ID NO: 478 - protein, 478 aa, synthetic construct; identical to SEQ ID NO: 226

SEQ ID NO: 479 - protein, 214 aa, synthetic construct; identical to SEQ ID NO: 419

SEQ ID NO: 480 - protein, 453 aa, synthetic construct; identical to SEQ ID NO: 333

SEQ ID NO: 481 - protein, 478 aa, synthetic construct; identical to SEQ ID NO: 226

SEQ ID NO: 482 - protein, 214 aa, synthetic construct
DIQMTQSPSSVSASVGDRVTITCRASEDGYSGLAWYQQKPGKSPKLLIYGASSRQDGVPSRFSGSGSGTDYTLTISSLQPEDFATYFCQEGLKFPYTFGAGTKLEIKRTVAAPSVFIFPPSDEQLKSGTASVVCLLNNFYPREAKVQWKVDNALQSGNSQESVTEQDSKDSTYSLSSTLTLSKADYEKHKVYACEVTHQGLSSPVTKSFNRGEC

SEQ ID NO: 483 - protein, 453 aa, synthetic construct; identical to SEQ ID NO: 333

SEQ ID NO: 484 - protein, 478 aa, synthetic construct; identical to SEQ ID NO: 226

SEQ ID NO: 485 - protein, 214 aa, synthetic construct
DIQMTQSPSSVSASVGDRVTITCRASEDGYSGLAWYQQKPGKSPKLLIYGASSRQDGVPSRFSGSGSGTDYTLTISSLQPEDFATYFCQEGLSVPYTFGAGTKLEIKRTVAAPSVFIFPPSDEQLKSGTASVVCLLNNFYPREAKVQWKVDNALQSGNSQESVTEQDSKDSTYSLSSTLTLSKADYEKHKVYACEVTHQGLSSPVTKSFNRGEC

SEQ ID NO: 486 - protein, 453 aa, synthetic construct; identical to SEQ ID NO: 333

SEQ ID NO: 487 - protein, 478 aa, synthetic construct; identical to SEQ ID NO: 226

SEQ ID NO: 488 - protein, 214 aa, synthetic construct
DIQMTQSPSSVSASVGDRVTITCRASEDGYSGLAWYQQKPGKSPKLLIYGASSRQDGVPSRFSGSGSGTDYTLTISSLQPEDFATYFCQEGLKVPYTFGQGTKLEIKRTVAAPSVFIFPPSDEQLKSGTASVVCLLNNFYPREAKVQWKVDNALQSGNSQESVTEQDSKDSTYSLSSTLTLSKADYEKHKVYACEVTHQGLSSPVTKSFNRGEC

SEQ ID NO: 489 - protein, 453 aa, synthetic construct; identical to SEQ ID NO: 333

SEQ ID NO: 490 - protein, 478 aa, synthetic construct; identical to SEQ ID NO: 226

SEQ ID NO: 491 - protein, 214 aa, synthetic construct
DIQMTQSPSSVSASVGDRVTITCRASEDGYSGLAWYQQKPGKSPKLLIYGASSRQDGVPSRFSGSGSGTDYTLTISSLQPEDFATYFCQEGLSFPYTFGAGTKLEIKRTVAAPSVFIFPPSDEQLKSGTASVVCLLNNFYPREAKVQWKVDNALQSGNSQESVTEQDSKDSTYSLSSTLTLSKADYEKHKVYACEVTHQGLSSPVTKSFNRGEC

SEQ ID NO: 492 - protein, 453 aa, synthetic construct; identical to SEQ ID NO: 333

SEQ ID NO: 493 - protein, 478 aa, synthetic construct; identical to SEQ ID NO: 226

SEQ ID NO: 494 - protein, 214 aa, synthetic construct
DIQMTQSPSSVSASVGDRVTITCRASEDGYSGLAWYQQKPGKSPKLLIYGASSRQDGVPSRFSGSGSGTDYTLTISSLQPEDFATYFCQEGLKFPYTFGQGTKLEIKRTVAAPSVFIFPPSDEQLKSGTASVVCLLNNFYPREAKVQWKVDNALQSGNSQESVTEQDSKDSTYSLSSTLTLSKADYEKHKVYACEVTHQGLSSPVTKSFNRGEC

SEQ ID NO: 495 - protein, 453 aa, synthetic construct; identical to SEQ ID NO: 333

SEQ ID NO: 496 - protein, 478 aa, synthetic construct; identical to SEQ ID NO: 226

SEQ ID NO: 497 - protein, 214 aa, synthetic construct
DIQMTQSPSSVSASVGDRVTITCRASEDGYSGLAWYQQKPGKSPKLLIYGASSRQDGVPSRFSGSGSGTDYTLTISSLQPEDFATYFCQEGLSFPYTFGQGTKLEIKRTVAAPSVFIFPPSDEQLKSGTASVVCLLNNFYPREAKVQWKVDNALQSGNSQESVTEQDSKDSTYSLSSTLTLSKADYEKHKVYACEVTHQGLSSPVTKSFNRGEC

SEQ ID NO: 498 - protein, 453 aa, synthetic construct; identical to SEQ ID NO: 333

SEQ ID NO: 499 - protein, 478 aa, synthetic construct; identical to SEQ ID NO: 226

SEQ ID NO: 500 - protein, 214 aa, synthetic construct
DIQMTQSPSSVSASVGDRVTITCRASEDGYSGLAWYQQKPGKSPKLLIYGASSRQDGVPSRFSGSGSGTDYTLTISSLQPEDFATYFCQEGLSVPYTFGQGTKLEIKRTVAAPSVFIFPPSDEQLKSGTASVVCLLNNFYPREAKVQWKVDNALQSGNSQESVTEQDSKDSTYSLSSTLTLSKADYEKHKVYACEVTHQGLSSPVTKSFNRGEC

SEQ ID NO: 501 - protein, 453 aa, synthetic construct; identical to SEQ ID NO: 456

SEQ ID NO: 502 - protein, 478 aa, synthetic construct; identical to SEQ ID NO: 226

SEQ ID NO: 503 - protein, 214 aa, synthetic construct; identical to SEQ ID NO: 482

SEQ ID NO: 504 - protein, 453 aa, synthetic construct; identical to SEQ ID NO: 456

SEQ ID NO: 505 - protein, 478 aa, synthetic construct; identical to SEQ ID NO: 226

SEQ ID NO: 506 - protein, 214 aa, synthetic construct; identical to SEQ ID NO: 485

SEQ ID NO: 507 - protein, 453 aa, synthetic construct; identical to SEQ ID NO: 456

SEQ ID NO: 508 - protein, 478 aa, synthetic construct; identical to SEQ ID NO: 226

SEQ ID NO: 509 - protein, 214 aa, synthetic construct; identical to SEQ ID NO: 488

SEQ ID NO: 510 - protein, 453 aa, synthetic construct; identical to SEQ ID NO: 456

SEQ ID NO: 511 - protein, 478 aa, synthetic construct; identical to SEQ ID NO: 226

SEQ ID NO: 512 - protein, 214 aa, synthetic construct; identical to SEQ ID NO: 491

SEQ ID NO: 513 - protein, 453 aa, synthetic construct; identical to SEQ ID NO: 456

SEQ ID NO: 514 - protein, 478 aa, synthetic construct; identical to SEQ ID NO: 226

SEQ ID NO: 515 - protein, 214 aa, synthetic construct; identical to SEQ ID NO: 494

SEQ ID NO: 516 - protein, 453 aa, synthetic construct; identical to SEQ ID NO: 456

SEQ ID NO: 517 - protein, 478 aa, synthetic construct; identical to SEQ ID NO: 226

SEQ ID NO: 518 - protein, 214 aa, synthetic construct; identical to SEQ ID NO: 497

SEQ ID NO: 519 - protein, 453 aa, synthetic construct; identical to SEQ ID NO: 456

SEQ ID NO: 520 - protein, 478 aa, synthetic construct; identical to SEQ ID NO: 226

SEQ ID NO: 521 - protein, 214 aa, synthetic construct; identical to SEQ ID NO: 500

SEQ ID NO: 522 - protein, 453 aa, synthetic construct; identical to SEQ ID NO: 357

SEQ ID NO: 523 - protein, 478 aa, synthetic construct; identical to SEQ ID NO: 226

SEQ ID NO: 524 - protein, 214 aa, synthetic construct; identical to SEQ ID NO: 410

SEQ ID NO: 525 - protein, 453 aa, synthetic construct; identical to SEQ ID NO: 357

SEQ ID NO: 526 - protein, 478 aa, synthetic construct; identical to SEQ ID NO: 226

SEQ ID NO: 527 - protein, 214 aa, synthetic construct; identical to SEQ ID NO: 413

SEQ ID NO: 528 - protein, 453 aa, synthetic construct; identical to SEQ ID NO: 357

SEQ ID NO: 529 - protein, 478 aa, synthetic construct; identical to SEQ ID NO: 226

SEQ ID NO: 530 - protein, 214 aa, synthetic construct; identical to SEQ ID NO: 416

SEQ ID NO: 531 - protein, 453 aa, synthetic construct; identical to SEQ ID NO: 357

SEQ ID NO: 532 - protein, 478 aa, synthetic construct; identical to SEQ ID NO: 226

SEQ ID NO: 533 - protein, 214 aa, synthetic construct; identical to SEQ ID NO: 419

SEQ ID NO: 534 - protein, 453 aa, synthetic construct
QVQLVQSGAEVKKPGASVKVSCKVSGFSVLSYNVHWVRQAPGQGLEWMGVMWSSGNTDYNSKFQGRVTMTRDTSTNTVYMELSSLRSEDTAVYYCARAGRYYHDSNYYWDFPYWGQGTLVTVSSASTKGPSVFPLAPSSKSTSGGTAALGCLVKDYFPEPVTVSWNSGALTSGVHTFPAVLQSSGLYSLSSVVTVPSSSLGTQTYICNVNHKPSDTKVDKKVEPKSCDKTHTCPPCPAPPVAGPSVFLFPPKPKDTLMISRTPEVTCVVVDVKHEDPEVKFNWYVDGVEVHNAKTKPREEEYNSTYRVVSVLTVLHQDWLNGKEYKCKVSNKALPAPIEKTISKAKGQPREPQVYTLPPSREEMTKNQVSLTCDVSGFYPSDIAVEWESDGQPENNYKTTPPVLDSDGSFFLYSKLTVDKSRWEQGDVFSCSVLHEALHSHYTQKSLSLSPGK

SEQ ID NO: 535 - protein, 478 aa, synthetic construct; identical to SEQ ID NO: 226

SEQ ID NO: 536 - protein, 214 aa, synthetic construct; identical to SEQ ID NO: 278

SEQ ID NO: 537 - protein, 453 aa, synthetic construct; identical to SEQ ID NO: 534

SEQ ID NO: 538 - protein, 478 aa, synthetic construct; identical to SEQ ID NO: 226

SEQ ID NO: 539 - protein, 214 aa, synthetic construct; identical to SEQ ID NO: 326

SEQ ID NO: 540 - protein, 453 aa, synthetic construct; identical to SEQ ID NO: 534

SEQ ID NO: 541 - protein, 478 aa, synthetic construct; identical to SEQ ID NO: 226

SEQ ID NO: 542 - protein, 214 aa, synthetic construct; identical to SEQ ID NO: 329

SEQ ID NO: 543 - protein, 453 aa, synthetic construct; identical to SEQ ID NO: 534

SEQ ID NO: 544 - protein, 478 aa, synthetic construct; identical to SEQ ID NO: 226

SEQ ID NO: 545 - protein, 214 aa, synthetic construct; identical to SEQ ID NO: 332

SEQ ID NO: 546 - protein, 453 aa, synthetic construct; identical to SEQ ID NO: 534

SEQ ID NO: 547 - protein, 478 aa, synthetic construct; identical to SEQ ID NO: 226

SEQ ID NO: 548 - protein, 214 aa, synthetic construct; identical to SEQ ID NO: 410

SEQ ID NO: 549 - protein, 453 aa, synthetic construct; identical to SEQ ID NO: 534

SEQ ID NO: 550 - protein, 478 aa, synthetic construct; identical to SEQ ID NO: 226

SEQ ID NO: 551 - protein, 214 aa, synthetic construct; identical to SEQ ID NO: 413

SEQ ID NO: 552 - protein, 453 aa, synthetic construct; identical to SEQ ID NO: 534

SEQ ID NO: 553 - protein, 478 aa, synthetic construct; identical to SEQ ID NO: 226

SEQ ID NO: 554 - protein, 214 aa, synthetic construct; identical to SEQ ID NO: 416

SEQ ID NO: 555 - protein, 453 aa, synthetic construct; identical to SEQ ID NO: 534

SEQ ID NO: 556 - protein, 478 aa, synthetic construct; identical to SEQ ID NO: 226

SEQ ID NO: 557 - protein, 214 aa, synthetic construct; identical to SEQ ID NO: 419

SEQ ID NO: 558 - protein, 453 aa, synthetic construct; identical to SEQ ID NO: 369

SEQ ID NO: 559 - protein, 478 aa, synthetic construct; identical to SEQ ID NO: 226

SEQ ID NO: 560 - protein, 214 aa, synthetic construct; identical to SEQ ID NO: 410

SEQ ID NO: 561 - protein, 453 aa, synthetic construct; identical to SEQ ID NO: 369

SEQ ID NO: 562 - protein, 478 aa, synthetic construct; identical to SEQ ID NO: 226

SEQ ID NO: 563 - protein, 214 aa, synthetic construct; identical to SEQ ID NO: 413

SEQ ID NO: 564 - protein, 453 aa, synthetic construct; identical to SEQ ID NO: 369

SEQ ID NO: 565 - protein, 478 aa, synthetic construct; identical to SEQ ID NO: 226

SEQ ID NO: 566 - protein, 214 aa, synthetic construct; identical to SEQ ID NO: 416

SEQ ID NO: 567 - protein, 453 aa, synthetic construct; identical to SEQ ID NO: 369

SEQ ID NO: 568 - protein, 478 aa, synthetic construct; identical to SEQ ID NO: 226

SEQ ID NO: 569 - protein, 214 aa, synthetic construct; identical to SEQ ID NO: 419

SEQ ID NO: 570 - protein, 453 aa, synthetic construct
QVQLVQSGAEVKKPGASVKVSCKVSGFSVTSYPVHWVRQAPGQGLEWMGVMWSSGKTDYNSKFQGRVTMTRDTSTNTVYMELSSLRSEDTAVYYCARAGRYYHDSNYYWDFPYWGQGTLVTVSSASTKGPSVFPLAPSSKSTSGGTAALGCLVKDYFPEPVTVSWNSGALTSGVHTFPAVLQSSGLYSLSSVVTVPSSSLGTQTYICNVNHKPSDTKVDKKVEPKSCDKTHTCPPCPAPPVAGPSVFLFPPKPKDTLMISRTPEVTCVVVDVKHEDPEVKFNWYVDGVEVHNAKTKPREEEYNSTYRVVSVLTVLHQDWLNGKEYKCKVSNKALPAPIEKTISKAKGQPREPQVYTLPPSREEMTKNQVSLTCDVSGFYPSDIAVEWESDGQPENNYKTTPPVLDSDGSFFLYSKLTVDKSRWEQGDVFSCSVLHEALHSHYTQKSLSLSPGK

SEQ ID NO: 571 - protein, 478 aa, synthetic construct; identical to SEQ ID NO: 226

SEQ ID NO: 572 - protein, 214 aa, synthetic construct; identical to SEQ ID NO: 278

SEQ ID NO: 573 - protein, 453 aa, synthetic construct; identical to SEQ ID NO: 570

SEQ ID NO: 574 - protein, 478 aa, synthetic construct; identical to SEQ ID NO: 226

SEQ ID NO: 575 - protein, 214 aa, synthetic construct; identical to SEQ ID NO: 326

SEQ ID NO: 576 - protein, 453 aa, synthetic construct; identical to SEQ ID NO: 570

SEQ ID NO: 577 - protein, 478 aa, synthetic construct; identical to SEQ ID NO: 226

SEQ ID NO: 578 - protein, 214 aa, synthetic construct; identical to SEQ ID NO: 329

SEQ ID NO: 579 - protein, 453 aa, synthetic construct; identical to SEQ ID NO: 570

SEQ ID NO: 580 - protein, 478 aa, synthetic construct; identical to SEQ ID NO: 226

SEQ ID NO: 581 - protein, 214 aa, synthetic construct; identical to SEQ ID NO: 332

SEQ ID NO: 582 - protein, 453 aa, synthetic construct; identical to SEQ ID NO: 570

SEQ ID NO: 583 - protein, 478 aa, synthetic construct; identical to SEQ ID NO: 226

SEQ ID NO: 584 - protein, 214 aa, synthetic construct; identical to SEQ ID NO: 410

SEQ ID NO: 585 - protein, 453 aa, synthetic construct; identical to SEQ ID NO: 570

SEQ ID NO: 586 - protein, 478 aa, synthetic construct; identical to SEQ ID NO: 226

SEQ ID NO: 587 - protein, 214 aa, synthetic construct; identical to SEQ ID NO: 413

SEQ ID NO: 588 - protein, 453 aa, synthetic construct; identical to SEQ ID NO: 570

SEQ ID NO: 589 - protein, 478 aa, synthetic construct; identical to SEQ ID NO: 226

SEQ ID NO: 590 - protein, 214 aa, synthetic construct; identical to SEQ ID NO: 416

SEQ ID NO: 591 - protein, 453 aa, synthetic construct; identical to SEQ ID NO: 570

SEQ ID NO: 592 - protein, 478 aa, synthetic construct; identical to SEQ ID NO: 226

SEQ ID NO: 593 - protein, 214 aa, synthetic construct; identical to SEQ ID NO: 419

SEQ ID NO: 594 - protein, 453 aa, synthetic construct; identical to SEQ ID NO: 381

SEQ ID NO: 595 - protein, 478 aa, synthetic construct; identical to SEQ ID NO: 226

SEQ ID NO: 596 - protein, 214 aa, synthetic construct; identical to SEQ ID NO: 410

SEQ ID NO: 597 - protein, 453 aa, synthetic construct; identical to SEQ ID NO: 381

SEQ ID NO: 598 - protein, 478 aa, synthetic construct; identical to SEQ ID NO: 226

SEQ ID NO: 599 - protein, 214 aa, synthetic construct; identical to SEQ ID NO: 413

SEQ ID NO: 600 - protein, 453 aa, synthetic construct; identical to SEQ ID NO: 381

SEQ ID NO: 601 - protein, 478 aa, synthetic construct; identical to SEQ ID NO: 226

SEQ ID NO: 602 - protein, 214 aa, synthetic construct; identical to SEQ ID NO: 416

SEQ ID NO: 603 - protein, 453 aa, synthetic construct; identical to SEQ ID NO: 381

SEQ ID NO: 604 - protein, 478 aa, synthetic construct; identical to SEQ ID NO: 226

SEQ ID NO: 605 - protein, 214 aa, synthetic construct; identical to SEQ ID NO: 419

SEQ ID NO: 606 - protein, 453 aa, synthetic construct
QVQLVQSGAEVKKPGASVKVSCKVSGFSVTSQNVHWVRQAPGQGLEWMGVMASSGNTDYNSKFQGRVTMTRDTSTNTVYMELSSLRSEDTAVYYCARAGRYYHDSNYYWDFPYWGQGTLVTVSSASTKGPSVFPLAPSSKSTSGGTAALGCLVKDYFPEPVTVSWNSGALTSGVHTFPAVLQSSGLYSLSSVVTVPSSSLGTQTYICNVNHKPSDTKVDKKVEPKSCDKTHTCPPCPAPPVAGPSVFLFPPKPKDTLMISRTPEVTCVVVDVKHEDPEVKFNWYVDGVEVHNAKTKPREEEYNSTYRVVSVLTVLHQDWLNGKEYKCKVSNKALPAPIEKTISKAKGQPREPQVYTLPPSREEMTKNQVSLTCDVSGFYPSDIAVEWESDGQPENNYKTTPPVLDSDGSFFLYSKLTVDKSRWEQGDVFSCSVLHEALHSHYTQKSLSLSPGK

SEQ ID NO: 607 - protein, 478 aa, synthetic construct; identical to SEQ ID NO: 226

SEQ ID NO: 608 - protein, 214 aa, synthetic construct; identical to SEQ ID NO: 278

SEQ ID NO: 609 - protein, 453 aa, synthetic construct; identical to SEQ ID NO: 606

SEQ ID NO: 610 - protein, 478 aa, synthetic construct; identical to SEQ ID NO: 226

SEQ ID NO: 611 - protein, 214 aa, synthetic construct; identical to SEQ ID NO: 326

SEQ ID NO: 612 - protein, 453 aa, synthetic construct; identical to SEQ ID NO: 606

SEQ ID NO: 613 - protein, 478 aa, synthetic construct; identical to SEQ ID NO: 226

SEQ ID NO: 614 - protein, 214 aa, synthetic construct; identical to SEQ ID NO: 329

SEQ ID NO: 615 - protein, 453 aa, synthetic construct; identical to SEQ ID NO: 606

SEQ ID NO: 616 - protein, 478 aa, synthetic construct; identical to SEQ ID NO: 226

SEQ ID NO: 617 - protein, 214 aa, synthetic construct; identical to SEQ ID NO: 332

SEQ ID NO: 618 - protein, 453 aa, synthetic construct; identical to SEQ ID NO: 606

SEQ ID NO: 619 - protein, 478 aa, synthetic construct; identical to SEQ ID NO: 226

SEQ ID NO: 620 - protein, 214 aa, synthetic construct; identical to SEQ ID NO: 410

SEQ ID NO: 621 - protein, 453 aa, synthetic construct; identical to SEQ ID NO: 606

SEQ ID NO: 622 - protein, 478 aa, synthetic construct; identical to SEQ ID NO: 226

SEQ ID NO: 623 - protein, 214 aa, synthetic construct; identical to SEQ ID NO: 413

SEQ ID NO: 624 - protein, 453 aa, synthetic construct; identical to SEQ ID NO: 606

SEQ ID NO: 625 - protein, 478 aa, synthetic construct; identical to SEQ ID NO: 226

SEQ ID NO: 626 - protein, 214 aa, synthetic construct; identical to SEQ ID NO: 416

SEQ ID NO: 627 - protein, 453 aa, synthetic construct; identical to SEQ ID NO: 606

SEQ ID NO: 628 - protein, 478 aa, synthetic construct; identical to SEQ ID NO: 226

SEQ ID NO: 629 - protein, 214 aa, synthetic construct; identical to SEQ ID NO: 419

SEQ ID NO: 630 - protein, 453 aa, synthetic construct
QVQLVQSGAEVKKPGASVKVSCKVSGFSVISYNVHWVRQAPGQGLEWMGVMWSGGNTDYNSKFQGRVTMTRDTSTNTVYMELSSLRSEDTAVYYCARAGRYYHDSNYYWDFPYWGQGTLVTVSSASTKGPSVFPLAPSSKSTSGGTAALGCLVKDYFPEPVTVSWNSGALTSGVHTFPAVLQSSGLYSLSSVVTVPSSSLGTQTYICNVNHKPSDTKVDKKVEPKSCDKTHTCPPCPAPPVAGPSVFLFPPKPKDTLMISRTPEVTCVVVDVKHEDPEVKFNWYVDGVEVHNAKTKPREEEYNSTYRVVSVLTVLHQDWLNGKEYKCKVSNKALPAPIEKTISKAKGQPREPQVYTLPPSREEMTKNQVSLTCDVSGFYPSDIAVEWESDGQPENNYKTTPPVLDSDGSFFLYSKLTVDKSRWEQGDVFSCSVLHEALHSHYTQKSLSLSPGK

SEQ ID NO: 631 - protein, 478 aa, synthetic construct; identical to SEQ ID NO: 226

SEQ ID NO: 632 - protein, 214 aa, synthetic construct; identical to SEQ ID NO: 278

SEQ ID NO: 633 - protein, 453 aa, synthetic construct
QVQLVQSGAEVKKPGASVKVSCKVSGFSVTSYNVHWVRQAPGQGLEWMGVMWIGGNTDYNSKFQGRVTMTRDTSTNTVYMELSSLRSEDTAVYYCARAGRYYHDSNYYWDFPYWGQGTLVTVSSASTKGPSVFPLAPSSKSTSGGTAALGCLVKDYFPEPVTVSWNSGALTSGVHTFPAVLQSSGLYSLSSVVTVPSSSLGTQTYICNVNHKPSDTKVDKKVEPKSCDKTHTCPPCPAPPVAGPSVFLFPPKPKDTLMISRTPEVTCVVVDVKHEDPEVKFNWYVDGVEVHNAKTKPREEEYNSTYRVVSVLTVLHQDWLNGKEYKCKVSNKALPAPIEKTISKAKGQPREPQVYTLPPSREEMTKNQVSLTCDVSGFYPSDIAVEWESDGQPENNYKTTPPVLDSDGSFFLYSKLTVDKSRWEQGDVFSCSVLHEALHSHYTQKSLSLSPGK

SEQ ID NO: 634 - protein, 478 aa, synthetic construct; identical to SEQ ID NO: 226

SEQ ID NO: 635 - protein, 214 aa, synthetic construct; identical to SEQ ID NO: 278

SEQ ID NO: 636 - protein, 453 aa, synthetic construct
QVQLVQSGAEVKKPGASVKVSCKVSGFSVTSYNVHWVRQAPGQGLEWMGVMWKGGNTDYNSKFQGRVTMTRDTSTNTVYMELSSLRSEDTAVYYCARAGRYYHDSNYYWDFPYWGQGTLVTVSSASTKGPSVFPLAPSSKSTSGGTAALGCLVKDYFPEPVTVSWNSGALTSGVHTFPAVLQSSGLYSLSSVVTVPSSSLGTQTYICNVNHKPSDTKVDKKVEPKSCDKTHTCPPCPAPPVAGPSVFLFPPKPKDTLMISRTPEVTCVVVDVKHEDPEVKFNWYVDGVEVHNAKTKPREEEYNSTYRVVSVLTVLHQDWLNGKEYKCKVSNKALPAPIEKTISKAKGQPREPQVYTLPPSREEMTKNQVSLTCDVSGFYPSDIAVEWESDGQPENNYKTTPPVLDSDGSFFLYSKLTVDKSRWEQGDVFSCSVLHEALHSHYTQKSLSLSPGK

SEQ ID NO: 637 - protein, 478 aa, synthetic construct; identical to SEQ ID NO: 226

SEQ ID NO: 638 - protein, 214 aa, synthetic construct; identical to SEQ ID NO: 278

SEQ ID NO: 639 - protein, 453 aa, synthetic construct
QVQLVQSGAEVKKPGASVKVSCKVSGFSVTSYNVHWVRQAPGQGLEWMGVMWRGGNTDYNSKFQGRVTMTRDTSTNTVYMELSSLRSEDTAVYYCARAGRYYHDSNYYWDFPYWGQGTLVTVSSASTKGPSVFPLAPSSKSTSGGTAALGCLVKDYFPEPVTVSWNSGALTSGVHTFPAVLQSSGLYSLSSVVTVPSSSLGTQTYICNVNHKPSDTKVDKKVEPKSCDKTHTCPPCPAPPVAGPSVFLFPPKPKDTLMISRTPEVTCVVVDVKHEDPEVKFNWYVDGVEVHNAKTKPREEEYNSTYRVVSVLTVLHQDWLNGKEYKCKVSNKALPAPIEKTISKAKGQPREPQVYTLPPSREEMTKNQVSLTCDVSGFYPSDIAVEWESDGQPENNYKTTPPVLDSDGSFFLYSKLTVDKSRWEQGDVFSCSVLHEALHSHYTQKSLSLSPGK

SEQ ID NO: 640 - protein, 478 aa, synthetic construct; identical to SEQ ID NO: 226

SEQ ID NO: 641 - protein, 214 aa, synthetic construct; identical to SEQ ID NO: 278

SEQ ID NO: 642 - protein, 453 aa, synthetic construct
QVQLVQSGAEVKKPGASVKVSCKVSGFSVTSYNVHWVRQAPGQGLEWMGVMWSGKNTDYNSKFQGRVTMTRDTSTNTVYMELSSLRSEDTAVYYCARAGRYYHDSNYYWDFPYWGQGTLVTVSSASTKGPSVFPLAPSSKSTSGGTAALGCLVKDYFPEPVTVSWNSGALTSGVHTFPAVLQSSGLYSLSSVVTVPSSSLGTQTYICNVNHKPSDTKVDKKVEPKSCDKTHTCPPCPAPPVAGPSVFLFPPKPKDTLMISRTPEVTCVVVDVKHEDPEVKFNWYVDGVEVHNAKTKPREEEYNSTYRVVSVLTVLHQDWLNGKEYKCKVSNKALPAPIEKTISKAKGQPREPQVYTLPPSREEMTKNQVSLTCDVSGFYPSDIAVEWESDGQPENNYKTTPPVLDSDGSFFLYSKLTVDKSRWEQGDVFSCSVLHEALHSHYTQKSLSLSPGK

SEQ ID NO: 643 - protein, 478 aa, synthetic construct; identical to SEQ ID NO: 226

SEQ ID NO: 644 - protein, 214 aa, synthetic construct; identical to SEQ ID NO: 278

SEQ ID NO: 645 - protein, 453 aa, synthetic construct
QVQLVQSGAEVKKPGASVKVSCKVSGFSVTSYNVHWVRQAPGQGLEWMGVMWSGGNTDYNSKFQGRVTMTRDTSTNTVYMELSSLRSEDTAVYYCARAGRYYGDSNYYWDFPYWGQGTLVTVSSASTKGPSVFPLAPSSKSTSGGTAALGCLVKDYFPEPVTVSWNSGALTSGVHTFPAVLQSSGLYSLSSVVTVPSSSLGTQTYICNVNHKPSDTKVDKKVEPKSCDKTHTCPPCPAPPVAGPSVFLFPPKPKDTLMISRTPEVTCVVVDVKHEDPEVKFNWYVDGVEVHNAKTKPREEEYNSTYRVVSVLTVLHQDWLNGKEYKCKVSNKALPAPIEKTISKAKGQPREPQVYTLPPSREEMTKNQVSLTCDVSGFYPSDIAVEWESDGQPENNYKTTPPVLDSDGSFFLYSKLTVDKSRWEQGDVFSCSVLHEALHSHYTQKSLSLSPGK

SEQ ID NO: 646 - protein, 478 aa, synthetic construct; identical to SEQ ID NO: 226

SEQ ID NO: 647 - protein, 214 aa, synthetic construct; identical to SEQ ID NO: 278

SEQ ID NO: 648 - protein, 453 aa, synthetic construct
QVQLVQSGAEVKKPGASVKVSCKVSGFSVTSYNVHWVRQAPGQGLEWMGVMWSGGNTDYNSKFQGRVTMTRDTSTNTVYMELSSLRSEDTAVYYCARAGRYYVDSNYYWDFPYWGQGTLVTVSSASTKGPSVFPLAPSSKSTSGGTAALGCLVKDYFPEPVTVSWNSGALTSGVHTFPAVLQSSGLYSLSSVVTVPSSSLGTQTYICNVNHKPSDTKVDKKVEPKSCDKTHTCPPCPAPPVAGPSVFLFPPKPKDTLMISRTPEVTCVVVDVKHEDPEVKFNWYVDGVEVHNAKTKPREEEYNSTYRVVSVLTVLHQDWLNGKEYKCKVSNKALPAPIEKTISKAKGQPREPQVYTLPPSREEMTKNQVSLTCDVSGFYPSDIAVEWESDGQPENNYKTTPPVLDSDGSFFLYSKLTVDKSRWEQGDVFSCSVLHEALHSHYTQKSLSLSPGK

SEQ ID NO: 649 - protein, 478 aa, synthetic construct; identical to SEQ ID NO: 226

SEQ ID NO: 650 - protein, 214 aa, synthetic construct; identical to SEQ ID NO: 278

SEQ ID NO: 651 - protein, 453 aa, synthetic construct
QVQLVQSGAEVKKPGASVKVSCKVSGFSVTSYNVHWVRQAPGQGLEWMGVMWSGGNTDYNSKFQGRVTMTRDTSTNTVYMELSSLRSEDTAVYYCARAGRYYHDENYYWDFPYWGQGTLVTVSSASTKGPSVFPLAPSSKSTSGGTAALGCLVKDYFPEPVTVSWNSGALTSGVHTFPAVLQSSGLYSLSSVVTVPSSSLGTQTYICNVNHKPSDTKVDKKVEPKSCDKTHTCPPCPAPPVAGPSVFLFPPKPKDTLMISRTPEVTCVVVDVKHEDPEVKFNWYVDGVEVHNAKTKPREEEYNSTYRVVSVLTVLHQDWLNGKEYKCKVSNKALPAPIEKTISKAKGQPREPQVYTLPPSREEMTKNQVSLTCDVSGFYPSDIAVEWESDGQPENNYKTTPPVLDSDGSFFLYSKLTVDKSRWEQGDVFSCSVLHEALHSHYTQKSLSLSPGK

SEQ ID NO: 652 - protein, 478 aa, synthetic construct; identical to SEQ ID NO: 226

SEQ ID NO: 653 - protein, 214 aa, synthetic construct; identical to SEQ ID NO: 278

SEQ ID NO: 654 - protein, 453 aa, synthetic construct
QVQLVQSGAEVKKPGASVKVSCKVSGFSVDSYNVHWVRQAPGQGLEWMGVMWIGGNTDYNSKFQGRVTMTRDTSTNTVYMELSSLRSEDTAVYYCARAGRYYHDSNYYWDFPYWGQGTLVTVSSASTKGPSVFPLAPSSKSTSGGTAALGCLVKDYFPEPVTVSWNSGALTSGVHTFPAVLQSSGLYSLSSVVTVPSSSLGTQTYICNVNHKPSDTKVDKKVEPKSCDKTHTCPPCPAPPVAGPSVFLFPPKPKDTLMISRTPEVTCVVVDVKHEDPEVKFNWYVDGVEVHNAKTKPREEEYNSTYRVVSVLTVLHQDWLNGKEYKCKVSNKALPAPIEKTISKAKGQPREPQVYTLPPSREEMTKNQVSLTCDVSGFYPSDIAVEWESDGQPENNYKTTPPVLDSDGSFFLYSKLTVDKSRWEQGDVFSCSVLHEALHSHYTQKSLSLSPGK

SEQ ID NO: 655 - protein, 478 aa, synthetic construct; identical to SEQ ID NO: 226

SEQ ID NO: 656 - protein, 214 aa, synthetic construct; identical to SEQ ID NO: 278

SEQ ID NO: 657 - protein, 453 aa, synthetic construct
QVQLVQSGAEVKKPGASVKVSCKVSGFSVTSYNVHWVRQAPGQGLEWMGVMWIGSNTDYNSKFQGRVTMTRDTSTNTVYMELSSLRSEDTAVYYCARAGRYYHDSNYYWDFPYWGQGTLVTVSSASTKGPSVFPLAPSSKSTSGGTAALGCLVKDYFPEPVTVSWNSGALTSGVHTFPAVLQSSGLYSLSSVVTVPSSSLGTQTYICNVNHKPSDTKVDKKVEPKSCDKTHTCPPCPAPPVAGPSVFLFPPKPKDTLMISRTPEVTCVVVDVKHEDPEVKFNWYVDGVEVHNAKTKPREEEYNSTYRVVSVLTVLHQDWLNGKEYKCKVSNKALPAPIEKTISKAKGQPREPQVYTLPPSREEMTKNQVSLTCDVSGFYPSDIAVEWESDGQPENNYKTTPPVLDSDGSFFLYSKLTVDKSRWEQGDVFSCSVLHEALHSHYTQKSLSLSPGK

SEQ ID NO: 658 - protein, 478 aa, synthetic construct; identical to SEQ ID NO: 226

SEQ ID NO: 659 - protein, 214 aa, synthetic construct; identical to SEQ ID NO: 278

SEQ ID NO: 660 - protein, 453 aa, synthetic construct
QVQLVQSGAEVKKPGASVKVSCKVSGFSVTSYNVHWVRQAPGQGLEWMGVMWSGGNTDYNSKFQGRVTMTRDTSTNTVYMELSSLRSEDTAVYYCARAGRYYGDSDYYWDFPYWGQGTLVTVSSASTKGPSVFPLAPSSKSTSGGTAALGCLVKDYFPEPVTVSWNSGALTSGVHTFPAVLQSSGLYSLSSVVTVPSSSLGTQTYICNVNHKPSDTKVDKKVEPKSCDKTHTCPPCPAPPVAGPSVFLFPPKPKDTLMISRTPEVTCVVVDVKHEDPEVKFNWYVDGVEVHNAKTKPREEEYNSTYRVVSVLTVLHQDWLNGKEYKCKVSNKALPAPIEKTISKAKGQPREPQVYTLPPSREEMTKNQVSLTCDVSGFYPSDIAVEWESDGQPENNYKTTPPVLDSDGSFFLYSKLTVDKSRWEQGDVFSCSVLHEALHSHYTQKSLSLSPGK

SEQ ID NO: 661 - protein, 478 aa, synthetic construct; identical to SEQ ID NO: 226

SEQ ID NO: 662 - protein, 214 aa, synthetic construct; identical to SEQ ID NO: 278

SEQ ID NO: 663 - protein, 449 aa, synthetic construct
EVQLVQSGAEVKKPGESLKISCKASGYTFTDQTIHWMRQMPGKGLEWMGYIYPRDDSPKYSESFQGQVTISADKSISTAYLQWSSLKASDTAMYYCAIPDRSGYAWFIYWGQGTLVTVSSASTKGPSVFPLAPSSKSTSGGTAALGCLVKDYFPEPVTVSWNSGALTSGVHTFPAVLQSSGLYSLSSVVTVPSSSLGTQTYICNVNHKPSDTKVDKKVEPKSCDKTHTCPPCPAPPVAGPSVFLFPPKPKDTLMISRTPEVTCVVVDVKHEDPEVKFNWYVDGVEVHNAKTKPREEEYNSTYRVVSVLTVLHQDWLNGKEYKCKVSNKALPAPIEKTISKAKGQPREPQVYTLPPSREEMTKNQVSLTCDVSGFYPSDIAVEWESDGQPENNYKTTPPVLDSDGSFFLYSKLTVDKSRWEQGDVFSCSVLHEALHSHYTQKSLSLSPGK

SEQ ID NO: 664 - protein, 482 aa, synthetic construct; identical to SEQ ID NO: 295

SEQ ID NO: 665 - protein, 214 aa, synthetic construct; identical to SEQ ID NO: 178

SEQ ID NO: 666 - protein, 449 aa, synthetic construct; identical to SEQ ID NO: 663

SEQ ID NO: 667 - protein, 482 aa, synthetic construct; identical to SEQ ID NO: 295

SEQ ID NO: 668 - protein, 214 aa, synthetic construct; identical to SEQ ID NO: 404

SEQ ID NO: 669 - protein, 449 aa, synthetic construct; identical to SEQ ID NO: 663

SEQ ID NO: 670 - protein, 482 aa, synthetic construct; identical to SEQ ID NO: 295

SEQ ID NO: 671 - protein, 214 aa, synthetic construct; identical to SEQ ID NO: 407

SEQ ID NO: 672 - protein, 449 aa, synthetic construct; identical to SEQ ID NO: 402

SEQ ID NO: 673 - protein, 482 aa, synthetic construct; identical to SEQ ID NO: 295

SEQ ID NO: 674 - protein, 214 aa, synthetic construct; identical to SEQ ID NO: 178

SEQ ID NO: 675 - protein, 449 aa, synthetic construct; identical to SEQ ID NO: 189

SEQ ID NO: 676 - protein, 482 aa, synthetic construct; identical to SEQ ID NO: 295

SEQ ID NO: 677 - protein, 214 aa, synthetic construct; identical to SEQ ID NO: 404

SEQ ID NO: 678 - protein, 449 aa, synthetic construct; identical to SEQ ID NO: 189

SEQ ID NO: 679 - protein, 482 aa, synthetic construct; identical to SEQ ID NO: 295

SEQ ID NO: 680 - protein, 214 aa, synthetic construct
DIQMTQSPSSLSASVGDRVTITCKASRDVAIAVAWYQQKPGKVPKLLIYWASQRHTGVPSRFSGSGSRTDFTLTISSLQPEDVADYFCHQYSSYPFTFGSGTKLEIKRTVAAPSVFIFPPSDEQLKSGTASVVCLLNNFYPREAKVQWKVDNALQSGNSQESVTEQDSKDSTYSLSSTLTLSKADYEKHKVYACEVTHQGLSSPVTKSFNRGEC

SEQ ID NO: 681 - protein, 449 aa, synthetic construct; identical to SEQ ID NO: 189

SEQ ID NO: 682 - protein, 482 aa, synthetic construct; identical to SEQ ID NO: 295

SEQ ID NO: 683 - protein, 214 aa, synthetic construct
DIQMTQSPSSLSASVGDRVTITCKASRDVAIAVAWYQQKPGKVPKLLIYWASVRHTGVPSRFSGSGSRTDFTLTISSLQPEDVADYFCHQYSSYPFTFGSGTKLEIKRTVAAPSVFIFPPSDEQLKSGTASVVCLLNNFYPREAKVQWKVDNALQSGNSQESVTEQDSKDSTYSLSSTLTLSKADYEKHKVYACEVTHQGLSSPVTKSFNRGEC

SEQ ID NO: 684 - protein, 449 aa, synthetic construct; identical to SEQ ID NO: 189

SEQ ID NO: 685 - protein, 482 aa, synthetic construct; identical to SEQ ID NO: 295

SEQ ID NO: 686 - protein, 214 aa, synthetic construct
DIQMTQSPSSLSASVGDRVTITCKASRDVAIAVAWYQQKPGKQPKLLIYWASTRHTGVPSRFSGSGSRTDFTLTISSLQPEDVADYFCHQYSSYPFTFGSGTKLEIKRTVAAPSVFIFPPSDEQLKSGTASVVCLLNNFYPREAKVQWKVDNALQSGNSQESVTEQDSKDSTYSLSSTLTLSKADYEKHKVYACEVTHQGLSSPVTKSFNRGEC

SEQ ID NO: 687 - protein, 449 aa, synthetic construct; identical to SEQ ID NO: 189

SEQ ID NO: 688 - protein, 482 aa, synthetic construct; identical to SEQ ID NO: 295

SEQ ID NO: 689 - protein, 214 aa, synthetic construct
DIQMTQSPSSLSASVGDRVTITCKASRDVAIAVAWYQQKPGKVPKLLIYWASTRHTGVPSRFSGSGSRTDFTLTISSLQPEDVADYFCYQYSSYPFTFGSGTKLEIKRTVAAPSVFIFPPSDEQLKSGTASVVCLLNNFYPREAKVQWKVDNALQSGNSQESVTEQDSKDSTYSLSSTLTLSKADYEKHKVYACEVTHQGLSSPVTKSFNRGEC

SEQ ID NO: 690 - protein, 449 aa, synthetic construct; identical to SEQ ID NO: 189

SEQ ID NO: 691 - protein, 482 aa, synthetic construct; identical to SEQ ID NO: 295

SEQ ID NO: 692 - protein, 214 aa, synthetic construct
DIQMTQSPSSLSASVGDRVTITCKASRDVAWAVAWYQQKPGKVPKLLIYWASTRHTGVPSRFSGSGSRTDFTLTISSLQPEDVADYFCHQYSSYPFTFGSGTKLEIKRTVAAPSVFIFPPSDEQLKSGTASVVCLLNNFYPREAKVQWKVDNALQSGNSQESVTEQDSKDSTYSLSSTLTLSKADYEKHKVYACEVTHQGLSSPVTKSFNRGEC

SEQ ID NO: 693 - protein, 449 aa, synthetic construct; identical to SEQ ID NO: 663

SEQ ID NO: 694 - protein, 482 aa, synthetic construct; identical to SEQ ID NO: 295

SEQ ID NO: 695 - protein, 214 aa, synthetic construct; identical to SEQ ID NO: 680

SEQ ID NO: 696 - protein, 449 aa, synthetic construct; identical to SEQ ID NO: 663

SEQ ID NO: 697 - protein, 482 aa, synthetic construct; identical to SEQ ID NO: 295

SEQ ID NO: 698 - protein, 214 aa, synthetic construct; identical to SEQ ID NO: 683

SEQ ID NO: 699 - protein, 449 aa, synthetic construct; identical to SEQ ID NO: 663

SEQ ID NO: 700 - protein, 482 aa, synthetic construct; identical to SEQ ID NO: 295

SEQ ID NO: 701 - protein, 214 aa, synthetic construct; identical to SEQ ID NO: 686

SEQ ID NO: 702 - protein, 449 aa, synthetic construct; identical to SEQ ID NO: 663

SEQ ID NO: 703 - protein, 482 aa, synthetic construct; identical to SEQ ID NO: 295

SEQ ID NO: 704 - protein, 214 aa, synthetic construct; identical to SEQ ID NO: 689

SEQ ID NO: 705 - protein, 449 aa, synthetic construct; identical to SEQ ID NO: 663

SEQ ID NO: 706 - protein, 482 aa, synthetic construct; identical to SEQ ID NO: 295

SEQ ID NO: 707 - protein, 214 aa, synthetic construct; identical to SEQ ID NO: 692

SEQ ID NO: 708 - protein, 449 aa, synthetic construct; identical to SEQ ID NO: 189

SEQ ID NO: 709 - protein, 482 aa, synthetic construct; identical to SEQ ID NO: 295

SEQ ID NO: 710 - protein, 214 aa, synthetic construct
DIQMTQSPSSLSASVGDRVTITCKASRDVAWAVAWYQQKPGKVPKLLIYWASQRHTGVPSRFSGSGSRTDFTLTISSLQPEDVADYFCHQYSSYPFTFGSGTKLEIKRTVAAPSVFIFPPSDEQLKSGTASVVCLLNNFYPREAKVQWKVDNALQSGNSQESVTEQDSKDSTYSLSSTLTLSKADYEKHKVYACEVTHQGLSSPVTKSFNRGEC

SEQ ID NO: 711 - protein, 449 aa, synthetic construct; identical to SEQ ID NO: 189

SEQ ID NO: 712 - protein, 482 aa, synthetic construct; identical to SEQ ID NO: 295

SEQ ID NO: 713 - protein, 214 aa, synthetic construct
DIQMTQSPSSLSASVGDRVTITCKASRDVAWAVAWYQQKPGKVPKLLIYWASTRHTGVPSRFSGSGSRTDFTLTISSLQPEDVADYFCYQYSSYPFTFGSGTKLEIKRTVAAPSVFIFPPSDEQLKSGTASVVCLLNNFYPREAKVQWKVDNALQSGNSQESVTEQDSKDSTYSLSSTLTLSKADYEKHKVYACEVTHQGLSSPVTKSFNRGEC

SEQ ID NO: 714 - protein, 449 aa, synthetic construct; identical to SEQ ID NO: 189

SEQ ID NO: 715 - protein, 482 aa, synthetic construct; identical to SEQ ID NO: 295

SEQ ID NO: 716 - protein, 214 aa, synthetic construct
DIQMTQSPSSLSASVGDRVTITCKASRDVAIAVAWYQQKPGKVPKLLIYWASQRHTGVPSRFSGSGSRTDFTLTISSLQPEDVADYFCYQYSSYPFTFGSGTKLEIKRTVAAPSVFIFPPSDEQLKSGTASVVCLLNNFYPREAKVQWKVDNALQSGNSQESVTEQDSKDSTYSLSSTLTLSKADYEKHKVYACEVTHQGLSSPVTKSFNRGEC

SEQ ID NO: 717 - protein, 449 aa, synthetic construct
QVQLVQSGAEVKKPGSSVKVSCKASGYTFTDQTLHWMRQAPGQGLEWIGYIYPRDDSPKYNENFKGKVTITADKSTSTAYMELSSLRSEDTAVYYCAIPDRSGYAWFIYWGQGTLVTVSSASTKGPSVFPLAPSSKSTSGGTAALGCLVKDYFPEPVTVSWNSGALTSGVHTFPAVLQSSGLYSLSSVVTVPSSSLGTQTYICNVNHKPSDTKVDKKVEPKSCDKTHTCPPCPAPPVAGPSVFLFPPKPKDTLMISRTPEVTCVVVDVKHEDPEVKFNWYVDGVEVHNAKTKPREEEYNSTYRVVSVLTVLHQDWLNGKEYKCKVSNKALPAPIEKTISKAKGQPREPQVYTLPPSREEMTKNQVSLTCDVSGFYPSDIAVEWESDGQPENNYKTTPPVLDSDGSFFLYSKLTVDKSRWEQGDVFSCSVLHEALHSHYTQKSLSLSPGK

SEQ ID NO: 718 - protein, 482 aa, synthetic construct; identical to SEQ ID NO: 295

SEQ ID NO: 719 - protein, 214 aa, synthetic construct; identical to SEQ ID NO: 178

SEQ ID NO: 720 - protein, 449 aa, synthetic construct
QVQLVQSGAEVKKPGSSVKVSCKASGYTFTDQTIHWMRQAPGQGLEWAGYIYPRDDSPKYNENFKGKVTITADKSTSTAYMELSSLRSEDTAVYYCAIPDRSGYAWFIYWGQGTLVTVSSASTKGPSVFPLAPSSKSTSGGTAALGCLVKDYFPEPVTVSWNSGALTSGVHTFPAVLQSSGLYSLSSVVTVPSSSLGTQTYICNVNHKPSDTKVDKKVEPKSCDKTHTCPPCPAPPVAGPSVFLFPPKPKDTLMISRTPEVTCVVVDVKHEDPEVKFNWYVDGVEVHNAKTKPREEEYNSTYRVVSVLTVLHQDWLNGKEYKCKVSNKALPAPIEKTISKAKGQPREPQVYTLPPSREEMTKNQVSLTCDVSGFYPSDIAVEWESDGQPENNYKTTPPVLDSDGSFFLYSKLTVDKSRWEQGDVFSCSVLHEALHSHYTQKSLSLSPGK

SEQ ID NO: 721 - protein, 482 aa, synthetic construct; identical to SEQ ID NO: 295

SEQ ID NO: 722 - protein, 214 aa, synthetic construct; identical to SEQ ID NO: 178

SEQ ID NO: 723 - protein, 449 aa, synthetic construct
QVQLVQSGAEVKKPGSSVKVSCKASGYTFTDQTIHWMRQAPGQGLEWIGYIYPRDDVPKYNENFKGKVTITADKSTSTAYMELSSLRSEDTAVYYCAIPDRSGYAWFIYWGQGTLVTVSSASTKGPSVFPLAPSSKSTSGGTAALGCLVKDYFPEPVTVSWNSGALTSGVHTFPAVLQSSGLYSLSSVVTVPSSSLGTQTYICNVNHKPSDTKVDKKVEPKSCDKTHTCPPCPAPPVAGPSVFLFPPKPKDTLMISRTPEVTCVVVDVKHEDPEVKFNWYVDGVEVHNAKTKPREEEYNSTYRVVSVLTVLHQDWLNGKEYKCKVSNKALPAPIEKTISKAKGQPREPQVYTLPPSREEMTKNQVSLTCDVSGFYPSDIAVEWESDGQPENNYKTTPPVLDSDGSFFLYSKLTVDKSRWEQGDVFSCSVLHEALHSHYTQKSLSLSPGK

SEQ ID NO: 724 - protein, 482 aa, synthetic construct; identical to SEQ ID NO: 295

SEQ ID NO: 725 - protein, 214 aa, synthetic construct; identical to SEQ ID NO: 178

SEQ ID NO: 726 - protein, 449 aa, synthetic construct
QVQLVQSGAEVKKPGSSVKVSCKASGYTFTDQTIHWMRQAPGQGLEWIGYIYPRDDSPRYNENFKGKVTITADKSTSTAYMELSSLRSEDTAVYYCAIPDRSGYAWFIYWGQGTLVTVSSASTKGPSVFPLAPSSKSTSGGTAALGCLVKDYFPEPVTVSWNSGALTSGVHTFPAVLQSSGLYSLSSVVTVPSSSLGTQTYICNVNHKPSDTKVDKKVEPKSCDKTHTCPPCPAPPVAGPSVFLFPPKPKDTLMISRTPEVTCVVVDVKHEDPEVKFNWYVDGVEVHNAKTKPREEEYNSTYRVVSVLTVLHQDWLNGKEYKCKVSNKALPAPIEKTISKAKGQPREPQVYTLPPSREEMTKNQVSLTCDVSGFYPSDIAVEWESDGQPENNYKTTPPVLDSDGSFFLYSKLTVDKSRWEQGDVFSCSVLHEALHSHYTQKSLSLSPGK

SEQ ID NO: 727 - protein, 482 aa, synthetic construct; identical to SEQ ID NO: 295

SEQ ID NO: 728 - protein, 214 aa, synthetic construct; identical to SEQ ID NO: 178

SEQ ID NO: 729 - protein, 449 aa, synthetic construct
QVQLVQSGAEVKKPGSSVKVSCKASGYTFTDQTIHWMRQAPGQGLEWIGYIYPRDDSPKYNINFKGKVTITADKSTSTAYMELSSLRSEDTAVYYCAIPDRSGYAWFIYWGQGTLVTVSSASTKGPSVFPLAPSSKSTSGGTAALGCLVKDYFPEPVTVSWNSGALTSGVHTFPAVLQSSGLYSLSSVVTVPSSSLGTQTYICNVNHKPSDTKVDKKVEPKSCDKTHTCPPCPAPPVAGPSVFLFPPKPKDTLMISRTPEVTCVVVDVKHEDPEVKFNWYVDGVEVHNAKTKPREEEYNSTYRVVSVLTVLHQDWLNGKEYKCKVSNKALPAPIEKTISKAKGQPREPQVYTLPPSREEMTKNQVSLTCDVSGFYPSDIAVEWESDGQPENNYKTTPPVLDSDGSFFLYSKLTVDKSRWEQGDVFSCSVLHEALHSHYTQKSLSLSPGK

SEQ ID NO: 730 - protein, 482 aa, synthetic construct; identical to SEQ ID NO: 295

SEQ ID NO: 731 - protein, 214 aa, synthetic construct; identical to SEQ ID NO: 178

SEQ ID NO: 732 - protein, 449 aa, synthetic construct
QVQLVQSGAEVKKPGSSVKVSCKASGYTFTDQTIHWMRQAPGQGLEWIGYIYPRDDSPKYNENQKGKVTITADKSTSTAYMELSSLRSEDTAVYYCAIPDRSGYAWFIYWGQGTLVTVSSASTKGPSVFPLAPSSKSTSGGTAALGCLVKDYFPEPVTVSWNSGALTSGVHTFPAVLQSSGLYSLSSVVTVPSSSLGTQTYICNVNHKPSDTKVDKKVEPKSCDKTHTCPPCPAPPVAGPSVFLFPPKPKDTLMISRTPEVTCVVVDVKHEDPEVKFNWYVDGVEVHNAKTKPREEEYNSTYRVVSVLTVLHQDWLNGKEYKCKVSNKALPAPIEKTISKAKGQPREPQVYTLPPSREEMTKNQVSLTCDVSGFYPSDIAVEWESDGQPENNYKTTPPVLDSDGSFFLYSKLTVDKSRWEQGDVFSCSVLHEALHSHYTQKSLSLSPGK

SEQ ID NO: 733 - protein, 482 aa, synthetic construct; identical to SEQ ID NO: 295

SEQ ID NO: 734 - protein, 214 aa, synthetic construct; identical to SEQ ID NO: 178

SEQ ID NO: 735 - protein, 449 aa, synthetic construct
QVQLVQSGAEVKKPGSSVKVSCKASGYTFTDQTIHWMRQAPGQGLEWIGYIYPRDDSPKYNENFKGKVTITADISTSTAYMELSSLRSEDTAVYYCAIPDRSGYAWFIYWGQGTLVTVSSASTKGPSVFPLAPSSKSTSGGTAALGCLVKDYFPEPVTVSWNSGALTSGVHTFPAVLQSSGLYSLSSVVTVPSSSLGTQTYICNVNHKPSDTKVDKKVEPKSCDKTHTCPPCPAPPVAGPSVFLFPPKPKDTLMISRTPEVTCVVVDVKHEDPEVKFNWYVDGVEVHNAKTKPREEEYNSTYRVVSVLTVLHQDWLNGKEYKCKVSNKALPAPIEKTISKAKGQPREPQVYTLPPSREEMTKNQVSLTCDVSGFYPSDIAVEWESDGQPENNYKTTPPVLDSDGSFFLYSKLTVDKSRWEQGDVFSCSVLHEALHSHYTQKSLSLSPGK

SEQ ID NO: 736 - protein, 482 aa, synthetic construct; identical to SEQ ID NO: 295

SEQ ID NO: 737 - protein, 214 aa, synthetic construct; identical to SEQ ID NO: 178

SEQ ID NO: 738 - protein, 449 aa, synthetic construct
QVQLVQSGAEVKKPGSSVKVSCKASGYTFTDQTIHWMRQAPGQGLEWIGYIYPRDDSPKYNENFKGKVTITADKSTSTSYMELSSLRSEDTAVYYCAIPDRSGYAWFIYWGQGTLVTVSSASTKGPSVFPLAPSSKSTSGGTAALGCLVKDYFPEPVTVSWNSGALTSGVHTFPAVLQSSGLYSLSSVVTVPSSSLGTQTYICNVNHKPSDTKVDKKVEPKSCDKTHTCPPCPAPPVAGPSVFLFPPKPKDTLMISRTPEVTCVVVDVKHEDPEVKFNWYVDGVEVHNAKTKPREEEYNSTYRVVSVLTVLHQDWLNGKEYKCKVSNKALPAPIEKTISKAKGQPREPQVYTLPPSREEMTKNQVSLTCDVSGFYPSDIAVEWESDGQPENNYKTTPPVLDSDGSFFLYSKLTVDKSRWEQGDVFSCSVLHEALHSHYTQKSLSLSPGK

SEQ ID NO: 739 - protein, 482 aa, synthetic construct; identical to SEQ ID NO: 295

SEQ ID NO: 740 - protein, 214 aa, synthetic construct; identical to SEQ ID NO: 178

SEQ ID NO: 741 - protein, 449 aa, synthetic construct
QVQLVQSGAEVKKPGSSVKVSCKASGYTFTDQTIHWMRQAPGQGLEWIGYIYPRDDSPKYNENFKGKVTITADKSTSTGYMELSSLRSEDTAVYYCAIPDRSGYAWFIYWGQGTLVTVSSASTKGPSVFPLAPSSKSTSGGTAALGCLVKDYFPEPVTVSWNSGALTSGVHTFPAVLQSSGLYSLSSVVTVPSSSLGTQTYICNVNHKPSDTKVDKKVEPKSCDKTHTCPPCPAPPVAGPSVFLFPPKPKDTLMISRTPEVTCVVVDVKHEDPEVKFNWYVDGVEVHNAKTKPREEEYNSTYRVVSVLTVLHQDWLNGKEYKCKVSNKALPAPIEKTISKAKGQPREPQVYTLPPSREEMTKNQVSLTCDVSGFYPSDIAVEWESDGQPENNYKTTPPVLDSDGSFFLYSKLTVDKSRWEQGDVFSCSVLHEALHSHYTQKSLSLSPGK

SEQ ID NO: 742 - protein, 482 aa, synthetic construct; identical to SEQ ID NO: 295

SEQ ID NO: 743 - protein, 214 aa, synthetic construct; identical to SEQ ID NO: 178

SEQ ID NO: 744 - protein, 449 aa, synthetic construct
QVQLVQSGAEVKKPGSSVKVSCKASGYTFTDQTIHWMRQAPGQGLEWIGYIYPRDDSPKYNENFKGKVTITADKSTSTAYMELSSLRSEDTAVYYCAIPDRVGYAWFIYWGQGTLVTVSSASTKGPSVFPLAPSSKSTSGGTAALGCLVKDYFPEPVTVSWNSGALTSGVHTFPAVLQSSGLYSLSSVVTVPSSSLGTQTYICNVNHKPSDTKVDKKVEPKSCDKTHTCPPCPAPPVAGPSVFLFPPKPKDTLMISRTPEVTCVVVDVKHEDPEVKFNWYVDGVEVHNAKTKPREEEYNSTYRVVSVLTVLHQDWLNGKEYKCKVSNKALPAPIEKTISKAKGQPREPQVYTLPPSREEMTKNQVSLTCDVSGFYPSDIAVEWESDGQPENNYKTTPPVLDSDGSFFLYSKLTVDKSRWEQGDVFSCSVLHEALHSHYTQKSLSLSPGK

SEQ ID NO: 745 - protein, 482 aa, synthetic construct; identical to SEQ ID NO: 295

SEQ ID NO: 746 - protein, 214 aa, synthetic construct; identical to SEQ ID NO: 178

SEQ ID NO: 747 - protein, 449 aa, synthetic construct
QVQLVQSGAEVKKPGSSVKVSCKASGYTFTDQTIHWMRQAPGQGLEWIGYIYPRDDSPKYNENFKGKVTITADKSTSTAYMELSSLRSEDTAVYYCAIPDRSGYAFFIYWGQGTLVTVSSASTKGPSVFPLAPSSKSTSGGTAALGCLVKDYFPEPVTVSWNSGALTSGVHTFPAVLQSSGLYSLSSVVTVPSSSLGTQTYICNVNHKPSDTKVDKKVEPKSCDKTHTCPPCPAPPVAGPSVFLFPPKPKDTLMISRTPEVTCVVVDVKHEDPEVKFNWYVDGVEVHNAKTKPREEEYNSTYRVVSVLTVLHQDWLNGKEYKCKVSNKALPAPIEKTISKAKGQPREPQVYTLPPSREEMTKNQVSLTCDVSGFYPSDIAVEWESDGQPENNYKTTPPVLDSDGSFFLYSKLTVDKSRWEQGDVFSCSVLHEALHSHYTQKSLSLSPGK

SEQ ID NO: 748 - protein, 482 aa, synthetic construct; identical to SEQ ID NO: 295

SEQ ID NO: 749 - protein, 214 aa, synthetic construct; identical to SEQ ID NO: 178

SEQ ID NO: 750 - protein, 449 aa, synthetic construct
QVQLVQSGAEVKKPGSSVKVSCKASGYTFTDQTIHWMRQAPGQGLEWIGYIYPRDDSPKYNENFKGKVTITADKSTSTAYMELSSLRSEDTAVYYCAIPDRSGYAWQIYWGQGTLVTVSSASTKGPSVFPLAPSSKSTSGGTAALGCLVKDYFPEPVTVSWNSGALTSGVHTFPAVLQSSGLYSLSSVVTVPSSSLGTQTYICNVNHKPSDTKVDKKVEPKSCDKTHTCPPCPAPPVAGPSVFLFPPKPKDTLMISRTPEVTCVVVDVKHEDPEVKFNWYVDGVEVHNAKTKPREEEYNSTYRVVSVLTVLHQDWLNGKEYKCKVSNKALPAPIEKTISKAKGQPREPQVYTLPPSREEMTKNQVSLTCDVSGFYPSDIAVEWESDGQPENNYKTTPPVLDSDGSFFLYSKLTVDKSRWEQGDVFSCSVLHEALHSHYTQKSLSLSPGK

SEQ ID NO: 751 - protein, 482 aa, synthetic construct; identical to SEQ ID NO: 295

SEQ ID NO: 752 - protein, 214 aa, synthetic construct; identical to SEQ ID NO: 178

SEQ ID NO: 753 - protein, 449 aa, synthetic construct; identical to SEQ ID NO: 750

SEQ ID NO: 754 - protein, 482 aa, synthetic construct; identical to SEQ ID NO: 295

SEQ ID NO: 755 - protein, 214 aa, synthetic construct; identical to SEQ ID NO: 716

SEQ ID NO: 756 - protein, 449 aa, synthetic construct; identical to SEQ ID NO: 723

SEQ ID NO: 757 - protein, 482 aa, synthetic construct; identical to SEQ ID NO: 295

SEQ ID NO: 758 - protein, 214 aa, synthetic construct; identical to SEQ ID NO: 716

SEQ ID NO: 759 - protein, 449 aa, synthetic construct; identical to SEQ ID NO: 747

SEQ ID NO: 760 - protein, 482 aa, synthetic construct; identical to SEQ ID NO: 295

SEQ ID NO: 761 - protein, 214 aa, synthetic construct; identical to SEQ ID NO: 716

SEQ ID NO: 762 - protein, 449 aa, synthetic construct; identical to SEQ ID NO: 744

SEQ ID NO: 763 - protein, 482 aa, synthetic construct; identical to SEQ ID NO: 295

SEQ ID NO: 764 - protein, 214 aa, synthetic construct; identical to SEQ ID NO: 716

SEQ ID NO: 765 - protein, 449 aa, synthetic construct; identical to SEQ ID NO: 726

SEQ ID NO: 766 - protein, 482 aa, synthetic construct; identical to SEQ ID NO: 295

SEQ ID NO: 767 - protein, 214 aa, synthetic construct; identical to SEQ ID NO: 716

SEQ ID NO: 768 - protein, 449 aa, synthetic construct; identical to SEQ ID NO: 723

SEQ ID NO: 769 - protein, 482 aa, synthetic construct; identical to SEQ ID NO: 295

SEQ ID NO: 770 - protein, 214 aa, synthetic construct; identical to SEQ ID NO: 683

SEQ ID NO: 771 - protein, 449 aa, synthetic construct; identical to SEQ ID NO: 723

SEQ ID NO: 772 - protein, 482 aa, synthetic construct; identical to SEQ ID NO: 295

SEQ ID NO: 773 - protein, 214 aa, synthetic construct; identical to SEQ ID NO: 686

SEQ ID NO: 774 - protein, 449 aa, synthetic construct; identical to SEQ ID NO: 723

SEQ ID NO: 775 - protein, 482 aa, synthetic construct; identical to SEQ ID NO: 295

SEQ ID NO: 776 - protein, 214 aa, synthetic construct; identical to SEQ ID NO: 689

SEQ ID NO: 777 - protein, 449 aa, synthetic construct; identical to SEQ ID NO: 726

SEQ ID NO: 778 - protein, 482 aa, synthetic construct; identical to SEQ ID NO: 295

SEQ ID NO: 779 - protein, 214 aa, synthetic construct; identical to SEQ ID NO: 683

SEQ ID NO: 780 - protein, 449 aa, synthetic construct; identical to SEQ ID NO: 726

SEQ ID NO: 781 - protein, 482 aa, synthetic construct; identical to SEQ ID NO: 295

SEQ ID NO: 782 - protein, 214 aa, synthetic construct; identical to SEQ ID NO: 686

SEQ ID NO: 783 - protein, 449 aa, synthetic construct; identical to SEQ ID NO: 726

SEQ ID NO: 784 - protein, 482 aa, synthetic construct; identical to SEQ ID NO: 295

SEQ ID NO: 785 - protein, 214 aa, synthetic construct; identical to SEQ ID NO: 689

SEQ ID NO: 786 - protein, 449 aa, synthetic construct; identical to SEQ ID NO: 744

SEQ ID NO: 787 - protein, 482 aa, synthetic construct; identical to SEQ ID NO: 295

SEQ ID NO: 788 - protein, 214 aa, synthetic construct; identical to SEQ ID NO: 683

SEQ ID NO: 789 - protein, 449 aa, synthetic construct; identical to SEQ ID NO: 744

SEQ ID NO: 790 - protein, 482 aa, synthetic construct; identical to SEQ ID NO: 295

SEQ ID NO: 791 - protein, 214 aa, synthetic construct; identical to SEQ ID NO: 686

SEQ ID NO: 792 - protein, 449 aa, synthetic construct; identical to SEQ ID NO: 744

SEQ ID NO: 793 - protein, 482 aa, synthetic construct; identical to SEQ ID NO: 295

SEQ ID NO: 794 - protein, 214 aa, synthetic construct; identical to SEQ ID NO: 689

SEQ ID NO: 795 - protein, 449 aa, synthetic construct; identical to SEQ ID NO: 747

SEQ ID NO: 796 - protein, 482 aa, synthetic construct; identical to SEQ ID NO: 295

SEQ ID NO: 797 - protein, 214 aa, synthetic construct; identical to SEQ ID NO: 683

SEQ ID NO: 798 - protein, 449 aa, synthetic construct; identical to SEQ ID NO: 747

SEQ ID NO: 799 - protein, 482 aa, synthetic construct; identical to SEQ ID NO: 295

SEQ ID NO: 800 - protein, 214 aa, synthetic construct; identical to SEQ ID NO: 686

SEQ ID NO: 801 - protein, 449 aa, synthetic construct; identical to SEQ ID NO: 747

SEQ ID NO: 802 - protein, 482 aa, synthetic construct; identical to SEQ ID NO: 295

SEQ ID NO: 803 - protein, 214 aa, synthetic construct; identical to SEQ ID NO: 689

SEQ ID NO: 804 - protein, 449 aa, synthetic construct; identical to SEQ ID NO: 750

SEQ ID NO: 805 - protein, 482 aa, synthetic construct; identical to SEQ ID NO: 295

SEQ ID NO: 806 - protein, 214 aa, synthetic construct; identical to SEQ ID NO: 683

SEQ ID NO: 807 - protein, 449 aa, synthetic construct; identical to SEQ ID NO: 750

SEQ ID NO: 808 - protein, 482 aa, synthetic construct; identical to SEQ ID NO: 295

SEQ ID NO: 809 - protein, 214 aa, synthetic construct; identical to SEQ ID NO: 686

SEQ ID NO: 810 - protein, 449 aa, synthetic construct; identical to SEQ ID NO: 750

SEQ ID NO: 811 - protein, 482 aa, synthetic construct; identical to SEQ ID NO: 295

SEQ ID NO: 812 - protein, 214 aa, synthetic construct; identical to SEQ ID NO: 689

SEQ ID NO: 813 - protein, 449 aa, synthetic construct; identical to SEQ ID NO: 663

SEQ ID NO: 814 - protein, 482 aa, synthetic construct; identical to SEQ ID NO: 295

SEQ ID NO: 815 - protein, 214 aa, synthetic construct; identical to SEQ ID NO: 710

SEQ ID NO: 816 - protein, 449 aa, synthetic construct; identical to SEQ ID NO: 663

SEQ ID NO: 817 - protein, 482 aa, synthetic construct; identical to SEQ ID NO: 295

SEQ ID NO: 818 - protein, 214 aa, synthetic construct; identical to SEQ ID NO: 713

SEQ ID NO: 819 - protein, 449 aa, synthetic construct; identical to SEQ ID NO: 663

SEQ ID NO: 820 - protein, 482 aa, synthetic construct; identical to SEQ ID NO: 295

SEQ ID NO: 821 - protein, 214 aa, synthetic construct; identical to SEQ ID NO: 716

SEQ ID NO: 822 - protein, 449 aa, synthetic construct
EVQLVQSGAEVKKPGESLKISCKASGYTFTDQTLHWMRQMPGKGLEWMGYIYPRDDSPKYSESFQGQVTISADKSISTAYLQWSSLKASDTAMYYCAIPDRSGYAWFIYWGQGTLVTVSSASTKGPSVFPLAPSSKSTSGGTAALGCLVKDYFPEPVTVSWNSGALTSGVHTFPAVLQSSGLYSLSSVVTVPSSSLGTQTYICNVNHKPSDTKVDKKVEPKSCDKTHTCPPCPAPPVAGPSVFLFPPKPKDTLMISRTPEVTCVVVDVKHEDPEVKFNWYVDGVEVHNAKTKPREEEYNSTYRVVSVLTVLHQDWLNGKEYKCKVSNKALPAPIEKTISKAKGQPREPQVYTLPPSREEMTKNQVSLTCDVSGFYPSDIAVEWESDGQPENNYKTTPPVLDSDGSFFLYSKLTVDKSRWEQGDVFSCSVLHEALHSHYTQKSLSLSPGK

SEQ ID NO: 823 - protein, 482 aa, synthetic construct; identical to SEQ ID NO: 295

SEQ ID NO: 824 - protein, 214 aa, synthetic construct; identical to SEQ ID NO: 178

SEQ ID NO: 825 - protein, 449 aa, synthetic construct
EVQLVQSGAEVKKPGESLKISCKASGYTFTDQTIHWMRQMPGKGLEWAGYIYPRDDSPKYSESFQGQVTISADKSISTAYLQWSSLKASDTAMYYCAIPDRSGYAWFIYWGQGTLVTVSSASTKGPSVFPLAPSSKSTSGGTAALGCLVKDYFPEPVTVSWNSGALTSGVHTFPAVLQSSGLYSLSSVVTVPSSSLGTQTYICNVNHKPSDTKVDKKVEPKSCDKTHTCPPCPAPPVAGPSVFLFPPKPKDTLMISRTPEVTCVVVDVKHEDPEVKFNWYVDGVEVHNAKTKPREEEYNSTYRVVSVLTVLHQDWLNGKEYKCKVSNKALPAPIEKTISKAKGQPREPQVYTLPPSREEMTKNQVSLTCDVSGFYPSDIAVEWESDGQPENNYKTTPPVLDSDGSFFLYSKLTVDKSRWEQGDVFSCSVLHEALHSHYTQKSLSLSPGK

SEQ ID NO: 826 - protein, 482 aa, synthetic construct; identical to SEQ ID NO: 295

SEQ ID NO: 827 - protein, 214 aa, synthetic construct; identical to SEQ ID NO: 178

SEQ ID NO: 828 - protein, 449 aa, synthetic construct
EVQLVQSGAEVKKPGESLKISCKASGYTFTDQTIHWMRQMPGKGLEWMGYIYPRDDVPKYSESFQGQVTISADKSISTAYLQWSSLKASDTAMYYCAIPDRSGYAWFIYWGQGTLVTVSSASTKGPSVFPLAPSSKSTSGGTAALGCLVKDYFPEPVTVSWNSGALTSGVHTFPAVLQSSGLYSLSSVVTVPSSSLGTQTYICNVNHKPSDTKVDKKVEPKSCDKTHTCPPCPAPPVAGPSVFLFPPKPKDTLMISRTPEVTCVVVDVKHEDPEVKFNWYVDGVEVHNAKTKPREEEYNSTYRVVSVLTVLHQDWLNGKEYKCKVSNKALPAPIEKTISKAKGQPREPQVYTLPPSREEMTKNQVSLTCDVSGFYPSDIAVEWESDGQPENNYKTTPPVLDSDGSFFLYSKLTVDKSRWEQGDVFSCSVLHEALHSHYTQKSLSLSPGK

SEQ ID NO: 829 - protein, 482 aa, synthetic construct; identical to SEQ ID NO: 295

SEQ ID NO: 830 - protein, 214 aa, synthetic construct; identical to SEQ ID NO: 178

SEQ ID NO: 831 - protein, 449 aa, synthetic construct
EVQLVQSGAEVKKPGESLKISCKASGYTFTDQTIHWMRQMPGKGLEWMGYIYPRDDSPRYSESFQGQVTISADKSISTAYLQWSSLKASDTAMYYCAIPDRSGYAWFIYWGQGTLVTVSSASTKGPSVFPLAPSSKSTSGGTAALGCLVKDYFPEPVTVSWNSGALTSGVHTFPAVLQSSGLYSLSSVVTVPSSSLGTQTYICNVNHKPSDTKVDKKVEPKSCDKTHTCPPCPAPPVAGPSVFLFPPKPKDTLMISRTPEVTCVVVDVKHEDPEVKFNWYVDGVEVHNAKTKPREEEYNSTYRVVSVLTVLHQDWLNGKEYKCKVSNKALPAPIEKTISKAKGQPREPQVYTLPPSREEMTKNQVSLTCDVSGFYPSDIAVEWESDGQPENNYKTTPPVLDSDGSFFLYSKLTVDKSRWEQGDVFSCSVLHEALHSHYTQKSLSLSPGK

SEQ ID NO: 832 - protein, 482 aa, synthetic construct; identical to SEQ ID NO: 295

SEQ ID NO: 833 - protein, 214 aa, synthetic construct; identical to SEQ ID NO: 178

SEQ ID NO: 834 - protein, 449 aa, synthetic construct
EVQLVQSGAEVKKPGESLKISCKASGYTFTDQTIHWMRQMPGKGLEWMGYIYPRDDSPKYSISFQGQVTISADKSISTAYLQWSSLKASDTAMYYCAIPDRSGYAWFIYWGQGTLVTVSSASTKGPSVFPLAPSSKSTSGGTAALGCLVKDYFPEPVTVSWNSGALTSGVHTFPAVLQSSGLYSLSSVVTVPSSSLGTQTYICNVNHKPSDTKVDKKVEPKSCDKTHTCPPCPAPPVAGPSVFLFPPKPKDTLMISRTPEVTCVVVDVKHEDPEVKFNWYVDGVEVHNAKTKPREEEYNSTYRVVSVLTVLHQDWLNGKEYKCKVSNKALPAPIEKTISKAKGQPREPQVYTLPPSREEMTKNQVSLTCDVSGFYPSDIAVEWESDGQPENNYKTTPPVLDSDGSFFLYSKLTVDKSRWEQGDVFSCSVLHEALHSHYTQKSLSLSPGK

SEQ ID NO: 835 - protein, 482 aa, synthetic construct; identical to SEQ ID NO: 295

SEQ ID NO: 836 - protein, 214 aa, synthetic construct; identical to SEQ ID NO: 178

SEQ ID NO: 837 - protein, 449 aa, synthetic construct
EVQLVQSGAEVKKPGESLKISCKASGYTFTDQTIHWMRQMPGKGLEWMGYIYPRDDSPKYSESQQGQVTISADKSISTAYLQWSSLKASDTAMYYCAIPDRSGYAWFIYWGQGTLVTVSSASTKGPSVFPLAPSSKSTSGGTAALGCLVKDYFPEPVTVSWNSGALTSGVHTFPAVLQSSGLYSLSSVVTVPSSSLGTQTYICNVNHKPSDTKVDKKVEPKSCDKTHTCPPCPAPPVAGPSVFLFPPKPKDTLMISRTPEVTCVVVDVKHEDPEVKFNWYVDGVEVHNAKTKPREEEYNSTYRVVSVLTVLHQDWLNGKEYKCKVSNKALPAPIEKTISKAKGQPREPQVYTLPPSREEMTKNQVSLTCDVSGFYPSDIAVEWESDGQPENNYKTTPPVLDSDGSFFLYSKLTVDKSRWEQGDVFSCSVLHEALHSHYTQKSLSLSPGK

SEQ ID NO: 838 - protein, 482 aa, synthetic construct; identical to SEQ ID NO: 295

SEQ ID NO: 839 - protein, 214 aa, synthetic construct; identical to SEQ ID NO: 178

SEQ ID NO: 840 - protein, 449 aa, synthetic construct
EVQLVQSGAEVKKPGESLKISCKASGYTFTDQTIHWMRQMPGKGLEWMGYIYPRDDSPKYSESFQGQVTISADISISTAYLQWSSLKASDTAMYYCAIPDRSGYAWFIYWGQGTLVTVSSASTKGPSVFPLAPSSKSTSGGTAALGCLVKDYFPEPVTVSWNSGALTSGVHTFPAVLQSSGLYSLSSVVTVPSSSLGTQTYICNVNHKPSDTKVDKKVEPKSCDKTHTCPPCPAPPVAGPSVFLFPPKPKDTLMISRTPEVTCVVVDVKHEDPEVKFNWYVDGVEVHNAKTKPREEEYNSTYRVVSVLTVLHQDWLNGKEYKCKVSNKALPAPIEKTISKAKGQPREPQVYTLPPSREEMTKNQVSLTCDVSGFYPSDIAVEWESDGQPENNYKTTPPVLDSDGSFFLYSKLTVDKSRWEQGDVFSCSVLHEALHSHYTQKSLSLSPGK

SEQ ID NO: 841 - protein, 482 aa, synthetic construct; identical to SEQ ID NO: 295

SEQ ID NO: 842 - protein, 214 aa, synthetic construct; identical to SEQ ID NO: 178

SEQ ID NO: 843 - protein, 449 aa, synthetic construct
EVQLVQSGAEVKKPGESLKISCKASGYTFTDQTIHWMRQMPGKGLEWMGYIYPRDDSPKYSESFQGQVTISADKSISTSYLQWSSLKASDTAMYYCAIPDRSGYAWFIYWGQGTLVTVSSASTKGPSVFPLAPSSKSTSGGTAALGCLVKDYFPEPVTVSWNSGALTSGVHTFPAVLQSSGLYSLSSVVTVPSSSLGTQTYICNVNHKPSDTKVDKKVEPKSCDKTHTCPPCPAPPVAGPSVFLFPPKPKDTLMISRTPEVTCVVVDVKHEDPEVKFNWYVDGVEVHNAKTKPREEEYNSTYRVVSVLTVLHQDWLNGKEYKCKVSNKALPAPIEKTISKAKGQPREPQVYTLPPSREEMTKNQVSLTCDVSGFYPSDIAVEWESDGQPENNYKTTPPVLDSDGSFFLYSKLTVDKSRWEQGDVFSCSVLHEALHSHYTQKSLSLSPGK

SEQ ID NO: 844 - protein, 482 aa, synthetic construct; identical to SEQ ID NO: 295

SEQ ID NO: 845 - protein, 214 aa, synthetic construct; identical to SEQ ID NO: 178

SEQ ID NO: 846 - protein, 449 aa, synthetic construct
EVQLVQSGAEVKKPGESLKISCKASGYTFTDQTIHWMRQMPGKGLEWMGYIYPRDDSPKYSESFQGQVTISADKSISTGYLQWSSLKASDTAMYYCAIPDRSGYAWFIYWGQGTLVTVSSASTKGPSVFPLAPSSKSTSGGTAALGCLVKDYFPEPVTVSWNSGALTSGVHTFPAVLQSSGLYSLSSVVTVPSSSLGTQTYICNVNHKPSDTKVDKKVEPKSCDKTHTCPPCPAPPVAGPSVFLFPPKPKDTLMISRTPEVTCVVVDVKHEDPEVKFNWYVDGVEVHNAKTKPREEEYNSTYRVVSVLTVLHQDWLNGKEYKCKVSNKALPAPIEKTISKAKGQPREPQVYTLPPSREEMTKNQVSLTCDVSGFYPSDIAVEWESDGQPENNYKTTPPVLDSDGSFFLYSKLTVDKSRWEQGDVFSCSVLHEALHSHYTQKSLSLSPGK

SEQ ID NO: 847 - protein, 482 aa, synthetic construct; identical to SEQ ID NO: 295

SEQ ID NO: 848 - protein, 214 aa, synthetic construct; identical to SEQ ID NO: 178

SEQ ID NO: 849 - protein, 449 aa, synthetic construct
EVQLVQSGAEVKKPGESLKISCKASGYTFTDQTIHWMRQMPGKGLEWMGYIYPRDDSPKYSESFQGQVTISADKSISTAYLQWSSLKASDTAMYYCAIPDRVGYAWFIYWGQGTLVTVSSASTKGPSVFPLAPSSKSTSGGTAALGCLVKDYFPEPVTVSWNSGALTSGVHTFPAVLQSSGLYSLSSVVTVPSSSLGTQTYICNVNHKPSDTKVDKKVEPKSCDKTHTCPPCPAPPVAGPSVFLFPPKPKDTLMISRTPEVTCVVVDVKHEDPEVKFNWYVDGVEVHNAKTKPREEEYNSTYRVVSVLTVLHQDWLNGKEYKCKVSNKALPAPIEKTISKAKGQPREPQVYTLPPSREEMTKNQVSLTCDVSGFYPSDIAVEWESDGQPENNYKTTPPVLDSDGSFFLYSKLTVDKSRWEQGDVFSCSVLHEALHSHYTQKSLSLSPGK

SEQ ID NO: 850 - protein, 482 aa, synthetic construct; identical to SEQ ID NO: 295

SEQ ID NO: 851 - protein, 214 aa, synthetic construct; identical to SEQ ID NO: 178

SEQ ID NO: 852 - protein, 449 aa, synthetic construct
EVQLVQSGAEVKKPGESLKISCKASGYTFTDQTIHWMRQMPGKGLEWMGYIYPRDDSPKYSESFQGQVTISADKSISTAYLQWSSLKASDTAMYYCAIPDRSGYAFFIYWGQGTLVTVSSASTKGPSVFPLAPSSKSTSGGTAALGCLVKDYFPEPVTVSWNSGALTSGVHTFPAVLQSSGLYSLSSVVTVPSSSLGTQTYICNVNHKPSDTKVDKKVEPKSCDKTHTCPPCPAPPVAGPSVFLFPPKPKDTLMISRTPEVTCVVVDVKHEDPEVKFNWYVDGVEVHNAKTKPREEEYNSTYRVVSVLTVLHQDWLNGKEYKCKVSNKALPAPIEKTISKAKGQPREPQVYTLPPSREEMTKNQVSLTCDVSGFYPSDIAVEWESDGQPENNYKTTPPVLDSDGSFFLYSKLTVDKSRWEQGDVFSCSVLHEALHSHYTQKSLSLSPGK

SEQ ID NO: 853 - protein, 482 aa, synthetic construct; identical to SEQ ID NO: 295

SEQ ID NO: 854 - protein, 214 aa, synthetic construct; identical to SEQ ID NO: 178

SEQ ID NO: 855 - protein, 449 aa, synthetic construct
EVQLVQSGAEVKKPGESLKISCKASGYTFTDQTIHWMRQMPGKGLEWMGYIYPRDDSPKYSESFQGQVTISADKSISTAYLQWSSLKASDTAMYYCAIPDRSGYAWQIYWGQGTLVTVSSASTKGPSVFPLAPSSKSTSGGTAALGCLVKDYFPEPVTVSWNSGALTSGVHTFPAVLQSSGLYSLSSVVTVPSSSLGTQTYICNVNHKPSDTKVDKKVEPKSCDKTHTCPPCPAPPVAGPSVFLFPPKPKDTLMISRTPEVTCVVVDVKHEDPEVKFNWYVDGVEVHNAKTKPREEEYNSTYRVVSVLTVLHQDWLNGKEYKCKVSNKALPAPIEKTISKAKGQPREPQVYTLPPSREEMTKNQVSLTCDVSGFYPSDIAVEWESDGQPENNYKTTPPVLDSDGSFFLYSKLTVDKSRWEQGDVFSCSVLHEALHSHYTQKSLSLSPGK

SEQ ID NO: 856 - protein, 482 aa, synthetic construct; identical to SEQ ID NO: 295

SEQ ID NO: 857 - protein, 214 aa, synthetic construct; identical to SEQ ID NO: 178

SEQ ID NO: 858 - protein, 449 aa, synthetic construct; identical to SEQ ID NO: 855

SEQ ID NO: 859 - protein, 482 aa, synthetic construct; identical to SEQ ID NO: 295

SEQ ID NO: 860 - protein, 214 aa, synthetic construct; identical to SEQ ID NO: 716

SEQ ID NO: 861 - protein, 449 aa, synthetic construct; identical to SEQ ID NO: 828

SEQ ID NO: 862 - protein, 482 aa, synthetic construct; identical to SEQ ID NO: 295

SEQ ID NO: 863 - protein, 214 aa, synthetic construct; identical to SEQ ID NO: 716

SEQ ID NO: 864 - protein, 449 aa, synthetic construct; identical to SEQ ID NO: 852

SEQ ID NO: 865 - protein, 482 aa, synthetic construct; identical to SEQ ID NO: 295

SEQ ID NO: 866 - protein, 214 aa, synthetic construct; identical to SEQ ID NO: 716

SEQ ID NO: 867 - protein, 449 aa, synthetic construct; identical to SEQ ID NO: 849

SEQ ID NO: 868 - protein, 482 aa, synthetic construct; identical to SEQ ID NO: 295

SEQ ID NO: 869 - protein, 214 aa, synthetic construct; identical to SEQ ID NO: 716

SEQ ID NO: 870 - protein, 449 aa, synthetic construct; identical to SEQ ID NO: 831

SEQ ID NO: 871 - protein, 482 aa, synthetic construct; identical to SEQ ID NO: 295

SEQ ID NO: 872 - protein, 214 aa, synthetic construct; identical to SEQ ID NO: 716

SEQ ID NO: 873 - protein, 449 aa, synthetic construct; identical to SEQ ID NO: 828

SEQ ID NO: 874 - protein, 482 aa, synthetic construct; identical to SEQ ID NO: 295

SEQ ID NO: 875 - protein, 214 aa, synthetic construct; identical to SEQ ID NO: 683

SEQ ID NO: 876 - protein, 449 aa, synthetic construct; identical to SEQ ID NO: 828

SEQ ID NO: 877 - protein, 482 aa, synthetic construct; identical to SEQ ID NO: 295

SEQ ID NO: 878 - protein, 214 aa, synthetic construct; identical to SEQ ID NO: 686

SEQ ID NO: 879 - protein, 449 aa, synthetic construct; identical to SEQ ID NO: 828

SEQ ID NO: 880 - protein, 482 aa, synthetic construct; identical to SEQ ID NO: 295

SEQ ID NO: 881 - protein, 214 aa, synthetic construct; identical to SEQ ID NO: 689

SEQ ID NO: 882 - protein, 449 aa, synthetic construct; identical to SEQ ID NO: 831

SEQ ID NO: 883 - protein, 482 aa, synthetic construct; identical to SEQ ID NO: 295

SEQ ID NO: 884 - protein, 214 aa, synthetic construct; identical to SEQ ID NO: 683

SEQ ID NO: 885 - protein, 449 aa, synthetic construct; identical to SEQ ID NO: 831

SEQ ID NO: 886 - protein, 482 aa, synthetic construct; identical to SEQ ID NO: 295

SEQ ID NO: 887 - protein, 214 aa, synthetic construct; identical to SEQ ID NO: 686

SEQ ID NO: 888 - protein, 449 aa, synthetic construct; identical to SEQ ID NO: 831

SEQ ID NO: 889 - protein, 482 aa, synthetic construct; identical to SEQ ID NO: 295

SEQ ID NO: 890 - protein, 214 aa, synthetic construct; identical to SEQ ID NO: 689

SEQ ID NO: 891 - protein, 449 aa, synthetic construct; identical to SEQ ID NO: 849

SEQ ID NO: 892 - protein, 482 aa, synthetic construct; identical to SEQ ID NO: 295

SEQ ID NO: 893 - protein, 214 aa, synthetic construct; identical to SEQ ID NO: 683

SEQ ID NO: 894 - protein, 449 aa, synthetic construct; identical to SEQ ID NO: 849

SEQ ID NO: 895 - protein, 482 aa, synthetic construct; identical to SEQ ID NO: 295

SEQ ID NO: 896 - protein, 214 aa, synthetic construct; identical to SEQ ID NO: 686

SEQ ID NO: 897 - protein, 449 aa, synthetic construct; identical to SEQ ID NO: 849

SEQ ID NO: 898 - protein, 482 aa, synthetic construct; identical to SEQ ID NO: 295

SEQ ID NO: 899 - protein, 214 aa, synthetic construct; identical to SEQ ID NO: 689

SEQ ID NO: 900 - protein, 449 aa, synthetic construct; identical to SEQ ID NO: 852

SEQ ID NO: 901 - protein, 482 aa, synthetic construct; identical to SEQ ID NO: 295

SEQ ID NO: 902 - protein, 214 aa, synthetic construct; identical to SEQ ID NO: 683

SEQ ID NO: 903 - protein, 449 aa, synthetic construct; identical to SEQ ID NO: 852

SEQ ID NO: 904 - protein, 482 aa, synthetic construct; identical to SEQ ID NO: 295

SEQ ID NO: 905 - protein, 214 aa, synthetic construct; identical to SEQ ID NO: 686

SEQ ID NO: 906 - protein, 449 aa, synthetic construct; identical to SEQ ID NO: 852

SEQ ID NO: 907 - protein, 482 aa, synthetic construct; identical to SEQ ID NO: 295

SEQ ID NO: 908 - protein, 214 aa, synthetic construct; identical to SEQ ID NO: 689

SEQ ID NO: 909 - protein, 449 aa, synthetic construct; identical to SEQ ID NO: 855

SEQ ID NO: 910 - protein, 482 aa, synthetic construct; identical to SEQ ID NO: 295

SEQ ID NO: 911 - protein, 214 aa, synthetic construct; identical to SEQ ID NO: 683

SEQ ID NO: 912 - protein, 449 aa, synthetic construct; identical to SEQ ID NO: 855

SEQ ID NO: 913 - protein, 482 aa, synthetic construct; identical to SEQ ID NO: 295

SEQ ID NO: 914 - protein, 214 aa, synthetic construct; identical to SEQ ID NO: 686

SEQ ID NO: 915 - protein, 449 aa, synthetic construct; identical to SEQ ID NO: 855

SEQ ID NO: 916 - protein, 482 aa, synthetic construct; identical to SEQ ID NO: 295

SEQ ID NO: 917 - protein, 214 aa, synthetic construct; identical to SEQ ID NO: 689

SEQ ID NO: 918 - protein, 449 aa, synthetic construct; identical to SEQ ID NO: 189

SEQ ID NO: 919 - protein, 482 aa, synthetic construct; identical to SEQ ID NO: 295

SEQ ID NO: 920 - protein, 214 aa, synthetic construct
DIQMTQSPSSLSASVGDRVTITCKASRDVAIAVAWYQQKPGKVPKLLIYWASVRHTGVPSRFSGSGSRTDFTLTISSLQPEDVADYFCYQYSSYPFTFGSGTKLEIKRTVAAPSVFIFPPSDEQLKSGTASVVCLLNNFYPREAKVQWKVDNALQSGNSQESVTEQDSKDSTYSLSSTLTLSKADYEKHKVYACEVTHQGLSSPVTKSFNRGEC

SEQ ID NO: 921 - protein, 449 aa, synthetic construct; identical to SEQ ID NO: 717

SEQ ID NO: 922 - protein, 482 aa, synthetic construct; identical to SEQ ID NO: 295

SEQ ID NO: 923 - protein, 214 aa, synthetic construct; identical to SEQ ID NO: 920

SEQ ID NO: 924 - protein, 449 aa, synthetic construct; identical to SEQ ID NO: 720

SEQ ID NO: 925 - protein, 482 aa, synthetic construct; identical to SEQ ID NO: 295

SEQ ID NO: 926 - protein, 214 aa, synthetic construct; identical to SEQ ID NO: 920

SEQ ID NO: 927 - protein, 449 aa, synthetic construct; identical to SEQ ID NO: 723

SEQ ID NO: 928 - protein, 482 aa, synthetic construct; identical to SEQ ID NO: 295

SEQ ID NO: 929 - protein, 214 aa, synthetic construct; identical to SEQ ID NO: 920

SEQ ID NO: 930 - protein, 449 aa, synthetic construct; identical to SEQ ID NO: 726

SEQ ID NO: 931 - protein, 482 aa, synthetic construct; identical to SEQ ID NO: 295

SEQ ID NO: 932 - protein, 214 aa, synthetic construct; identical to SEQ ID NO: 920

SEQ ID NO: 933 - protein, 449 aa, synthetic construct; identical to SEQ ID NO: 729

SEQ ID NO: 934 - protein, 482 aa, synthetic construct; identical to SEQ ID NO: 295

SEQ ID NO: 935 - protein, 214 aa, synthetic construct; identical to SEQ ID NO: 920

SEQ ID NO: 936 - protein, 449 aa, synthetic construct; identical to SEQ ID NO: 732

SEQ ID NO: 937 - protein, 482 aa, synthetic construct; identical to SEQ ID NO: 295

SEQ ID NO: 938 - protein, 214 aa, synthetic construct; identical to SEQ ID NO: 920

SEQ ID NO: 939 - protein, 449 aa, synthetic construct; identical to SEQ ID NO: 735

SEQ ID NO: 940 - protein, 482 aa, synthetic construct; identical to SEQ ID NO: 295

SEQ ID NO: 941 - protein, 214 aa, synthetic construct; identical to SEQ ID NO: 920

SEQ ID NO: 942 - protein, 449 aa, synthetic construct; identical to SEQ ID NO: 738

SEQ ID NO: 943 - protein, 482 aa, synthetic construct; identical to SEQ ID NO: 295

SEQ ID NO: 944 - protein, 214 aa, synthetic construct; identical to SEQ ID NO: 920

SEQ ID NO: 945 - protein, 449 aa, synthetic construct; identical to SEQ ID NO: 741

SEQ ID NO: 946 - protein, 482 aa, synthetic construct; identical to SEQ ID NO: 295

SEQ ID NO: 947 - protein, 214 aa, synthetic construct; identical to SEQ ID NO: 920

SEQ ID NO: 948 - protein, 449 aa, synthetic construct; identical to SEQ ID NO: 744

SEQ ID NO: 949 - protein, 482 aa, synthetic construct; identical to SEQ ID NO: 295

SEQ ID NO: 950 - protein, 214 aa, synthetic construct; identical to SEQ ID NO: 920

SEQ ID NO: 951 - protein, 449 aa, synthetic construct; identical to SEQ ID NO: 747

SEQ ID NO: 952 - protein, 482 aa, synthetic construct; identical to SEQ ID NO: 295

SEQ ID NO: 953 - protein, 214 aa, synthetic construct; identical to SEQ ID NO: 920

SEQ ID NO: 954 - protein, 449 aa, synthetic construct; identical to SEQ ID NO: 750

SEQ ID NO: 955 - protein, 482 aa, synthetic construct; identical to SEQ ID NO: 295

SEQ ID NO: 956 - protein, 214 aa, synthetic construct; identical to SEQ ID NO: 920

SEQ ID NO: 957 - protein, 449 aa, synthetic construct; identical to SEQ ID NO: 663

SEQ ID NO: 958 - protein, 482 aa, synthetic construct; identical to SEQ ID NO: 295

SEQ ID NO: 959 - protein, 214 aa, synthetic construct; identical to SEQ ID NO: 920

SEQ ID NO: 960 - protein, 449 aa, synthetic construct; identical to SEQ ID NO: 822

SEQ ID NO: 961 - protein, 482 aa, synthetic construct; identical to SEQ ID NO: 295

SEQ ID NO: 962 - protein, 214 aa, synthetic construct; identical to SEQ ID NO: 920

SEQ ID NO: 963 - protein, 449 aa, synthetic construct; identical to SEQ ID NO: 825

SEQ ID NO: 964 - protein, 482 aa, synthetic construct; identical to SEQ ID NO: 295

SEQ ID NO: 965 - protein, 214 aa, synthetic construct; identical to SEQ ID NO: 920

SEQ ID NO: 966 - protein, 449 aa, synthetic construct; identical to SEQ ID NO: 828

SEQ ID NO: 967 - protein, 482 aa, synthetic construct; identical to SEQ ID NO: 295

SEQ ID NO: 968 - protein, 214 aa, synthetic construct; identical to SEQ ID NO: 920

SEQ ID NO: 969 - protein, 449 aa, synthetic construct; identical to SEQ ID NO: 831

SEQ ID NO: 970 - protein, 482 aa, synthetic construct; identical to SEQ ID NO: 295

SEQ ID NO: 971 - protein, 214 aa, synthetic construct; identical to SEQ ID NO: 920

SEQ ID NO: 972 - protein, 449 aa, synthetic construct; identical to SEQ ID NO: 834

SEQ ID NO: 973 - protein, 482 aa, synthetic construct; identical to SEQ ID NO: 295

SEQ ID NO: 974 - protein, 214 aa, synthetic construct; identical to SEQ ID NO: 920

SEQ ID NO: 975 - protein, 449 aa, synthetic construct; identical to SEQ ID NO: 837

SEQ ID NO: 976 - protein, 482 aa, synthetic construct; identical to SEQ ID NO: 295

SEQ ID NO: 977 - protein, 214 aa, synthetic construct; identical to SEQ ID NO: 920

SEQ ID NO: 978 - protein, 449 aa, synthetic construct; identical to SEQ ID NO: 840

SEQ ID NO: 979 - protein, 482 aa, synthetic construct; identical to SEQ ID NO: 295

SEQ ID NO: 980 - protein, 214 aa, synthetic construct; identical to SEQ ID NO: 920

SEQ ID NO: 981 - protein, 449 aa, synthetic construct; identical to SEQ ID NO: 843

SEQ ID NO: 982 - protein, 482 aa, synthetic construct; identical to SEQ ID NO: 295

SEQ ID NO: 983 - protein, 214 aa, synthetic construct; identical to SEQ ID NO: 920

SEQ ID NO: 984 - protein, 449 aa, synthetic construct; identical to SEQ ID NO: 846

SEQ ID NO: 985 - protein, 482 aa, synthetic construct; identical to SEQ ID NO: 295

SEQ ID NO: 986 - protein, 214 aa, synthetic construct; identical to SEQ ID NO: 920

SEQ ID NO: 987 - protein, 449 aa, synthetic construct; identical to SEQ ID NO: 849

SEQ ID NO: 988 - protein, 482 aa, synthetic construct; identical to SEQ ID NO: 295

SEQ ID NO: 989 - protein, 214 aa, synthetic construct; identical to SEQ ID NO: 920

SEQ ID NO: 990 - protein, 449 aa, synthetic construct; identical to SEQ ID NO: 852

SEQ ID NO: 991 - protein, 482 aa, synthetic construct; identical to SEQ ID NO: 295

SEQ ID NO: 992 - protein, 214 aa, synthetic construct; identical to SEQ ID NO: 920

SEQ ID NO: 993 - protein, 449 aa, synthetic construct; identical to SEQ ID NO: 855

SEQ ID NO: 994 - protein, 482 aa, synthetic construct; identical to SEQ ID NO: 295

SEQ ID NO: 995 - protein, 214 aa, synthetic construct; identical to SEQ ID NO: 920

SEQ ID NO: 996 - protein, 453 aa, synthetic construct; identical to SEQ ID NO: 639

SEQ ID NO: 997 - protein, 478 aa, synthetic construct; identical to SEQ ID NO: 226

SEQ ID NO: 998 - protein, 214 aa, synthetic construct; identical to SEQ ID NO: 332

SEQ ID NO: 999 - protein, 453 aa, synthetic construct
QVQLVQSGAEVKKPGASVKVSCKVSGFSVTSYNVHWVRQAPGQGLEWMGVMWFGGNTDYNSKFQGRVTMTRDTSTNTVYMELSSLRSEDTAVYYCARAGRYYHDSNYYWDFPYWGQGTLVTVSSASTKGPSVFPLAPSSKSTSGGTAALGCLVKDYFPEPVTVSWNSGALTSGVHTFPAVLQSSGLYSLSSVVTVPSSSLGTQTYICNVNHKPSDTKVDKKVEPKSCDKTHTCPPCPAPPVAGPSVFLFPPKPKDTLMISRTPEVTCVVVDVKHEDPEVKFNWYVDGVEVHNAKTKPREEEYNSTYRVVSVLTVLHQDWLNGKEYKCKVSNKALPAPIEKTISKAKGQPREPQVYTLPPSREEMTKNQVSLTCDVSGFYPSDIAVEWESDGQPENNYKTTPPVLDSDGSFFLYSKLTVDKSRWEQGDVFSCSVLHEALHSHYTQKSLSLSPGK

SEQ ID NO: 1000 - protein, 478 aa, synthetic construct; identical to SEQ ID NO: 226

SEQ ID NO: 1001 - protein, 214 aa, synthetic construct; identical to SEQ ID NO: 332

SEQ ID NO: 1002 - protein, 453 aa, synthetic construct
QVQLVQSGAEVKKPGASVKVSCKVSGFPVTSYNVHWVRQAPGQGLEWMGVMWYGGNTDYNSKFQGRVTMTRDTSTNTVYMELSSLRSEDTAVYYCARAGRYYHDSNYYWDFPYWGQGTLVTVSSASTKGPSVFPLAPSSKSTSGGTAALGCLVKDYFPEPVTVSWNSGALTSGVHTFPAVLQSSGLYSLSSVVTVPSSSLGTQTYICNVNHKPSDTKVDKKVEPKSCDKTHTCPPCPAPPVAGPSVFLFPPKPKDTLMISRTPEVTCVVVDVKHEDPEVKFNWYVDGVEVHNAKTKPREEEYNSTYRVVSVLTVLHQDWLNGKEYKCKVSNKALPAPIEKTISKAKGQPREPQVYTLPPSREEMTKNQVSLTCDVSGFYPSDIAVEWESDGQPENNYKTTPPVLDSDGSFFLYSKLTVDKSRWEQGDVFSCSVLHEALHSHYTQKSLSLSPGK

SEQ ID NO: 1003 - protein, 478 aa, synthetic construct; identical to SEQ ID NO: 226

SEQ ID NO: 1004 - protein, 214 aa, synthetic construct; identical to SEQ ID NO: 332

SEQ ID NO: 1005 - protein, 453 aa, synthetic construct
QVQLVQSGAEVKKPGASVKVSCKVSGFSVTRYNVHWVRQAPGQGLEWMGVMWSGANTDYNSKFQGRVTMTRDTSTNTVYMELSSLRSEDTAVYYCARAGRYYVDSNYYWDFPYWGQGTLVTVSSASTKGPSVFPLAPSSKSTSGGTAALGCLVKDYFPEPVTVSWNSGALTSGVHTFPAVLQSSGLYSLSSVVTVPSSSLGTQTYICNVNHKPSDTKVDKKVEPKSCDKTHTCPPCPAPPVAGPSVFLFPPKPKDTLMISRTPEVTCVVVDVKHEDPEVKFNWYVDGVEVHNAKTKPREEEYNSTYRVVSVLTVLHQDWLNGKEYKCKVSNKALPAPIEKTISKAKGQPREPQVYTLPPSREEMTKNQVSLTCDVSGFYPSDIAVEWESDGQPENNYKTTPPVLDSDGSFFLYSKLTVDKSRWEQGDVFSCSVLHEALHSHYTQKSLSLSPGK

SEQ ID NO: 1006 - protein, 478 aa, synthetic construct; identical to SEQ ID NO: 226

SEQ ID NO: 1007 - protein, 214 aa, synthetic construct; identical to SEQ ID NO: 332

SEQ ID NO: 1008 - protein, 453 aa, synthetic construct
QVQLVQSGAEVKKPGASVKVSCKVSGFSVTSYNVHWVRQAPGQGLEWMGVMWYGGNTDYNSKFQGRVTMTRDTSTNTVYMELSSLRSEDTAVYYCARAGRYYVDSNYYWDFPYWGQGTLVTVSSASTKGPSVFPLAPSSKSTSGGTAALGCLVKDYFPEPVTVSWNSGALTSGVHTFPAVLQSSGLYSLSSVVTVPSSSLGTQTYICNVNHKPSDTKVDKKVEPKSCDKTHTCPPCPAPPVAGPSVFLFPPKPKDTLMISRTPEVTCVVVDVKHEDPEVKFNWYVDGVEVHNAKTKPREEEYNSTYRVVSVLTVLHQDWLNGKEYKCKVSNKALPAPIEKTISKAKGQPREPQVYTLPPSREEMTKNQVSLTCDVSGFYPSDIAVEWESDGQPENNYKTTPPVLDSDGSFFLYSKLTVDKSRWEQGDVFSCSVLHEALHSHYTQKSLSLSPGK

SEQ ID NO: 1009 - protein, 478 aa, synthetic construct; identical to SEQ ID NO: 226

SEQ ID NO: 1010 - protein, 214 aa, synthetic construct; identical to SEQ ID NO: 332

SEQ ID NO: 1011 - protein, 445 aa, synthetic construct
QVQLQESGPGLVRPSQTLSLTCTVSGFDIQDTYMHWVRQRPGRGLEWMGRIEPAGGHTKYNPSLKSRVTITRDTSKNQVSLRLSSVTAADTAVYYCVRSGGLPDAWGQGSLVTVSSASTKGPSVFPLAPSSKSTSGGTAALGCLVKDYFPEPVTVSWNSGALTSGVHTFPAVLQSSGLYSLSSVVTVPSSSLGTQTYICNVNHKPSDTKVDKKVEPKSCDKTHTCPPCPAPPVAGPSVFLFPPKPKDTLMISRTPEVTCVVVDVKHEDPEVKFNWYVDGVEVHNAKTKPREEEYNSTYRVVSVLTVLHQDWLNGKEYKCKVSNKALPAPIEKTISKAKGQPREPQVYTLPPSREEMTKNQVSLTCDVSGFYPSDIAVEWESDGQPENNYKTTPPVLDSDGSFFLYSKLTVDKSRWEQGDVFSCSVMHEALHNHYTQKSLSLSPGK

SEQ ID NO: 1012 - protein, 478 aa, synthetic construct; identical to SEQ ID NO: 226

SEQ ID NO: 1013 - protein, 213 aa, synthetic construct
DIQMTQSPSSLSASVGDRVTITCRASQGVRYMYWYQQKPGKAPKLLIYGASNLASGVPSRFSGSGSGTDFTFTISSLQPEDIATYYCQQWEGNPRTFGQGTKVEIKRTVAAPSVFIFPPSDEQLKSGTASVVCLLNNFYPREAKVQWKVDNALQSGNSQESVTEQDSKDSTYSLSSTLTLSKADYEKHKVYACEVTHQGLSSPVTKSFNRGEC

SEQ ID NO: 1014 - protein, 445 aa, synthetic construct
QVQLQESGPGLVRPSQTLSLTCTVSGFDMQDTYMHWVRQRPGRGLEWMGRIEPASGHTKYNPSLKSRVTITRDTSKNQVSLRLSSVTAADTAVYYCVRSGGLPDVWGQGSLVTVSSASTKGPSVFPLAPSSKSTSGGTAALGCLVKDYFPEPVTVSWNSGALTSGVHTFPAVLQSSGLYSLSSVVTVPSSSLGTQTYICNVNHKPSDTKVDKKVEPKSCDKTHTCPPCPAPPVAGPSVFLFPPKPKDTLMISRTPEVTCVVVDVKHEDPEVKFNWYVDGVEVHNAKTKPREEEYNSTYRVVSVLTVLHQDWLNGKEYKCKVSNKALPAPIEKTISKAKGQPREPQVYTLPPSREEMTKNQVSLTCDVSGFYPSDIAVEWESDGQPENNYKTTPPVLDSDGSFFLYSKLTVDKSRWEQGDVFSCSVMHEALHNHYTQKSLSLSPGK

SEQ ID NO: 1015 - protein, 478 aa, synthetic construct; identical to SEQ ID NO: 226

SEQ ID NO: 1016 - protein, 213 aa, synthetic construct
DIQMTQSPSSLSASVGDRVTITCRASQGVMYMYWYQQKPGKAPKLLIYGASNLASGVPSRFSGSGSGTDFTFTISSLQPEDIATYYCQQWEGNPRTFGQGTKVEIKRTVAAPSVFIFPPSDEQLKSGTASVVCLLNNFYPREAKVQWKVDNALQSGNSQESVTEQDSKDSTYSLSSTLTLSKADYEKHKVYACEVTHQGLSSPVTKSFNRGEC

SEQ ID NO: 1017 - protein, 445 aa, synthetic construct; identical to SEQ ID NO: 1011

SEQ ID NO: 1018 - protein, 478 aa, synthetic construct; identical to SEQ ID NO: 226

SEQ ID NO: 1019 - protein, 213 aa, synthetic construct
DIQMTQSPSSLSASVGDRVTITCRASQGVGYMYWYQQKPGKAPKLLIYSASNLASGVPSRFSGSGSGTDFTFTISSLQPEDIATYYCQQWEGNPRTFGQGTKVEIKRTVAAPSVFIFPPSDEQLKSGTASVVCLLNNFYPREAKVQWKVDNALQSGNSQESVTEQDSKDSTYSLSSTLTLSKADYEKHKVYACEVTHQGLSSPVTKSFNRGEC

SEQ ID NO: 1020 - protein, 449 aa, synthetic construct
QVQLVQSGAEVKKPGSSVKVSCKASGYTFTDQTIHWMREAPGQGLEWIGYIYPRDDSPKYNENFKGKVTITADKSTSTAYMELSSLRSEDTAVYYCAIPDRSGYAWFIYWGQGTLVTVSSASTKGPSVFPLAPSSKSTSGGTAALGCLVKDYFPEPVTVSWNSGALTSGVHTFPAVLQSSGLYSLSSVVTVPSSSLGTQTYICNVNHKPSDTKVDEKVEPDSCDKTHTCPPCPAPPVAGPSVFLFPPKPKDTLMISRTPEVTCVVVDVKHEDPEVKFNWYVDGVEVHNAKTKPREEEYNSTYRVVSVLTVLHQDWLNGKEYKCKVSNKALPAPIEKTISKAKGQPREPQVYTLPPSREEMTKNQVSLTCDVSGFYPSDIAVEWESDGQPENNYKTTPPVLDSDGSFFLYSKLTVDKSRWEQGDVFSCSVMHEALHNHYTQKSLSLSPGK

SEQ ID NO: 1021 - protein, 453 aa, synthetic construct
QVQLVQSGAEVKKPGASVKVSCKVSGFSVTSYNVHWVRKAPGQGLEWMGVMWSGGNTDYNSKFQGRVTMTRDTSTNTVYMELSSLRSEDTAVYYCARAGRYYHDSNYYWDFPYWGQGTLVTVSSASTKGPSVFPLAPSSKSTSGGTAFLGCLVKDYFPEPVTVSWNSGALTSGVHTFPAVLQSSGLYSLSSVVTVPSSSLGTQTYICNVNHKPSNTKVDKKVEPKSCDKTHTCPPCPAPPVAGPSVFLFPPKPKDTLMISRTPEVTCVVVDVKHEDPEVKFNWYVDGVEVHNAKTKPREEQYNSTYRVVSVLTVLHQDWLNGKEYKCKVSNKALPAPIEKTISKAKGQPREPQVYTLPPSREQMTKNQVKLTCLVKGFYPSDIAVEWESNGQPENNYKTTPPVLDSDGSFFLYSKLTVDKSRWQQGNVFSCSVMHEALHNHYTQKSLSLSPGK

SEQ ID NO: 1022 - protein, 214 aa, synthetic construct
DIQMTQSPSSLSASVGDRVTITCKASRDVAIAVAWYQKKPGKVPKLLIYWASTRHTGVPSRFSGSGSRTDFTLTISSLQPEDVADYFCHQYSSYPFTFGSGTKLEIKRTVAAPSVFIFPPSKKQLKSGTASVVCLLNNFYPREAKVQWKVDNALQSGNSQESVTEQDSKDSTYSLSSTLTLSKADYEKHKVYACEVTHQGLSSPVTKSFNRGEC

SEQ ID NO: 1023 - protein, 214 aa, synthetic construct
DIQMTQSPSSVSASVGDRVTITCRASEDIYSGLAWYQEKPGKSPKLLIYGASSLQDGVPSRFSGSGSGTDYTLTISSLQPEDFATYFCQEGLKSPYTFGAGTKLEIKRTVAAPSVFIAPPSDEQLKSGTASVVCLLNNFYPREAKVQWKVDNALQSGNSQESVTEQDSKDSTYSLSSTLTLSKADYEKHKVYACEVTHQGLSSPVTKSFNRGEC

SEQ ID NO: 1024 - protein, 449 aa, synthetic construct; identical to SEQ ID NO: 1020

SEQ ID NO: 1025 - protein, 214 aa, synthetic construct; identical to SEQ ID NO: 1022

SEQ ID NO: 1026 - protein, 443 aa, synthetic construct
EVQLVESGGGLVQPGGSLKLSCAASGFDIIDDYIHWVRKASGKGLEWVGRIDPASANTKYVPSVKGRFTISADTSKNTAYLQMNSLKTEDTAVYYCTRKGFAYWGQGTLVTVSSASTKGPSVFPLAPSSKSTSGGTAFLGCLVKDYFPEPVTVSWNSGALTSGVHTFPAVLQSSGLYSLSSVVTVPSSSLGTQTYICNVNHKPSNTKVDKKVEPKSCDKTHTCPPCPAPPVAGPSVFLFPPKPKDTLMISRTPEVTCVVVDVKHEDPEVKFNWYVDGVEVHNAKTKPREEQYNSTYRVVSVLTVLHQDWLNGKEYKCKVSNKALPAPIEKTISKAKGQPREPQVYTLPPSREQMTKNQVKLTCLVKGFYPSDIAVEWESNGQPENNYKTTPPVLDSDGSFFLYSKLTVDKSRWQQGNVFSCSVMHEALHNHYTQKSLSLSPGK

SEQ ID NO: 1027 - protein, 214 aa, synthetic construct
NIVMTQTPLSLSVTPGQPASISCKASENVGTYVSWYLEKPGQSPQLLIYGTSNRYTGVPDRFTGSGSATDFTLKISRVEAEDVGVYHCGQSYRYPYTFGGGTKLEIKRTVAAPSVFIAPPSDEQLKSGTASVVCLLNNFYPREAKVQWKVDNALQSGNSQESVTEQDSKDSTYSLSSTLTLSKADYEKHKVYACEVTHQGLSSPVTKSFNRGEC

SEQ ID NO: 1028 - protein, 449 aa, synthetic construct; identical to SEQ ID NO: 1020

SEQ ID NO: 1029 - protein, 448 aa, synthetic construct
EVQLVESGGGLVQPGGSLRLSCAASGFTFSSFGMHWVRKAPGKGLEWVSYISSGSTTIYYADSVKGRFTISRDNAKNSLYLQMNSLRAEDTAVYYCARAPLLRGAMDYWGQGTLVTVSSASTKGPSVFPLAPSSKSTSGGTAFLGCLVKDYFPEPVTVSWNSGALTSGVHTFPAVLQSSGLYSLSSVVTVPSSSLGTQTYICNVNHKPSNTKVDKKVEPKSCDKTHTCPPCPAPPVAGPSVFLFPPKPKDTLMISRTPEVTCVVVDVKHEDPEVKFNWYVDGVEVHNAKTKPREEQYNSTYRVVSVLTVLHQDWLNGKEYKCKVSNKALPAPIEKTISKAKGQPREPQVYTLPPSREQMTKNQVKLTCLVKGFYPSDIAVEWESNGQPENNYKTTPPVLDSDGSFFLYSKLTVDKSRWQQGNVFSCSVMHEALHNHYTQKSLSLSPGK

SEQ ID NO: 1030 - protein, 214 aa, synthetic construct; identical to SEQ ID NO: 1022

SEQ ID NO: 1031 - protein, 214 aa, synthetic construct
DIVMTQSPDSLAVSLGERATINCKASQDVSTAVVWYQEKPGQSPKLLIYWASTRHTGVPDRFTGSGSGTDYTLTISSLQAEDVAVYHCQQHYSTPYTFGGGTKLEIKRTVAAPSVFIAPPSDEQLKSGTASVVCLLNNFYPREAKVQWKVDNALQSGNSQESVTEQDSKDSTYSLSSTLTLSKADYEKHKVYACEVTHQGLSSPVTKSFNRGEC

SEQ ID NO: 1032 - protein, 449 aa, synthetic construct
QVQLVQSGAEVKKPGSSVKVSCKASGYTFTDQTIHWMREAPGQGLEWIGYIYPRDDSPKYNENFKGKVTITADKSTSTAYMELSSLRSEDTAVYYCAIPDRSGYAWFIYWGQGTLVTVSSASTKGPSVFPLAPSSKSTSGGTAALGCLVKDYFPEPVTVSWNSGALTSGVHTFPAVLQSSGLYSLSSVVTVPSSSLGTQTYICNVNHKPSDTKVDEKVEPDSCDKTHTCPPCPAPPVAGPSVFLFPPKPKDTLMISRTPEVTCVVVDVKHEDPEVKFNWYVDGVEVHNAKTKPREEEYNSTYRVVSVLTVLHQDWLNGKEYKCKVSNKALPAPIEKTISKAKGQPREPQVYTLPPSREEMTKNQVSLTCDVSGFYPSDIAVEWESDGQPENNYKTTPPVLDSDGSFFLYSKLTVDKSRWEQGDVFSCSVLHEALHSHYTQKSLSLSPGK

SEQ ID NO: 1033 - protein, 453 aa, synthetic construct
QVQLVQSGAEVKKPGASVKVSCKVSGFSVTSYNVHWVRKAPGQGLEWMGVMWSGGNTDYNSKFQGRVTMTRDTSTNTVYMELSSLRSEDTAVYYCARAGRYYHDSNYYWDFPYWGQGTLVTVSSASTKGPSVFPLAPSSKSTSGGTAFLGCLVKDYFPEPVTVSWNSGALTSGVHTFPAVLQSSGLYSLSSVVTVPSSSLGTQTYICNVNHKPSNTKVDKKVEPKSCDKTHTCPPCPAPPVAGPSVFLFPPKPKDTLMISRTPEVTCVVVDVKHEDPEVKFNWYVDGVEVHNAKTKPREEQYNSTYRVVSVLTVLHQDWLNGKEYKCKVSNKALPAPIEKTISKAKGQPREPQVYTLPPSREQMTKNQVKLTCLVKGFYPSDIAVEWESNGQPENNYKTTPPVLDSDGSFFLYSKLTVDKSRWQQGNVFSCSVLHEALHSHYTQKSLSLSPGK

SEQ ID NO: 1034 - protein, 214 aa, synthetic construct; identical to SEQ ID NO: 1022

SEQ ID NO: 1035 - protein, 214 aa, synthetic construct; identical to SEQ ID NO: 1023

SEQ ID NO: 1036 - protein, 449 aa, synthetic construct; identical to SEQ ID NO: 1032

SEQ ID NO: 1037 - protein, 443 aa, synthetic construct
EVQLVESGGGLVQPGGSLKLSCAASGFDIIDDYIHWVRKASGKGLEWVGRIDPASANTKYVPSVKGRFTISADTSKNTAYLQMNSLKTEDTAVYYCTRKGFAYWGQGTLVTVSSASTKGPSVFPLAPSSKSTSGGTAFLGCLVKDYFPEPVTVSWNSGALTSGVHTFPAVLQSSGLYSLSSVVTVPSSSLGTQTYICNVNHKPSNTKVDKKVEPKSCDKTHTCPPCPAPPVAGPSVFLFPPKPKDTLMISRTPEVTCVVVDVKHEDPEVKFNWYVDGVEVHNAKTKPREEQYNSTYRVVSVLTVLHQDWLNGKEYKCKVSNKALPAPIEKTISKAKGQPREPQVYTLPPSREQMTKNQVKLTCLVKGFYPSDIAVEWESNGQPENNYKTTPPVLDSDGSFFLYSKLTVDKSRWQQGNVFSCSVLHEALHSHYTQKSLSLSPGK

SEQ ID NO: 1038 - protein, 214 aa, synthetic construct; identical to SEQ ID NO: 1022

SEQ ID NO: 1039 - protein, 214 aa, synthetic construct; identical to SEQ ID NO: 1027

SEQ ID NO: 1040 - protein, 449 aa, synthetic construct; identical to SEQ ID NO: 1032

SEQ ID NO: 1041 - protein, 448 aa, synthetic construct
EVQLVESGGGLVQPGGSLRLSCAASGFTFSSFGMHWVRKAPGKGLEWVSYISSGSTTIYYADSVKGRFTISRDNAKNSLYLQMNSLRAEDTAVYYCARAPLLRGAMDYWGQGTLVTVSSASTKGPSVFPLAPSSKSTSGGTAFLGCLVKDYFPEPVTVSWNSGALTSGVHTFPAVLQSSGLYSLSSVVTVPSSSLGTQTYICNVNHKPSNTKVDKKVEPKSCDKTHTCPPCPAPPVAGPSVFLFPPKPKDTLMISRTPEVTCVVVDVKHEDPEVKFNWYVDGVEVHNAKTKPREEQYNSTYRVVSVLTVLHQDWLNGKEYKCKVSNKALPAPIEKTISKAKGQPREPQVYTLPPSREQMTKNQVKLTCLVKGFYPSDIAVEWESNGQPENNYKTTPPVLDSDGSFFLYSKLTVDKSRWQQGNVFSCSVLHEALHSHYTQKSLSLSPGK

SEQ ID NO: 1042 - protein, 214 aa, synthetic construct; identical to SEQ ID NO: 1022

SEQ ID NO: 1043 - protein, 214 aa, synthetic construct; identical to SEQ ID NO: 1031

SEQ ID NO: 1044 - protein, 453 aa, synthetic construct
QVQLVQSGAEVKKPGASVKVSCKVSGFSVTSYNVHWVREAPGQGLEWMGVMWSGGNTDYNSKFQGRVTMTRDTSTNTVYMELSSLRSEDTAVYYCARAGRYYHDSNYYWDFPYWGQGTLVTVSSASTKGPSVFPLAPSSKSTSGGTAALGCLVKDYFPEPVTVSWNSGALTSGVHTFPAVLQSSGLYSLSSVVTVPSSSLGTQTYICNVNHKPSDTKVDEKVEPDSCDKTHTCPPCPAPPVAGPSVFLFPPKPKDTLMISRTPEVTCVVVDVKHEDPEVKFNWYVDGVEVHNAKTKPREEEYNSTYRVVSVLTVLHQDWLNGKEYKCKVSNKALPAPIEKTISKAKGQPREPQVYTLPPSREEMTKNQVSLTCDVSGFYPSDIAVEWESDGQPENNYKTTPPVLDSDGSFFLYSKLTVDKSRWEQGDVFSCSVMHEALHNHYTQKSLSLSPGK

SEQ ID NO: 1045 - protein, 449 aa, synthetic construct
QVQLVQSGAEVKKPGSSVKVSCKASGYTFTDQTIHWMRKAPGQGLEWIGYIYPRDDSPKYNENFKGKVTITADKSTSTAYMELSSLRSEDTAVYYCAIPDRSGYAWFIYWGQGTLVTVSSASTKGPSVFPLAPSSKSTSGGTAFLGCLVKDYFPEPVTVSWNSGALTSGVHTFPAVLQSSGLYSLSSVVTVPSSSLGTQTYICNVNHKPSNTKVDKKVEPKSCDKTHTCPPCPAPPVAGPSVFLFPPKPKDTLMISRTPEVTCVVVDVKHEDPEVKFNWYVDGVEVHNAKTKPREEQYNSTYRVVSVLTVLHQDWLNGKEYKCKVSNKALPAPIEKTISKAKGQPREPQVYTLPPSREQMTKNQVKLTCLVKGFYPSDIAVEWESNGQPENNYKTTPPVLDSDGSFFLYSKLTVDKSRWQQGNVFSCSVMHEALHNHYTQKSLSLSPGK

SEQ ID NO: 1046 - protein, 214 aa, synthetic construct
DIQMTQSPSSVSASVGDRVTITCRASEDIYSGLAWYQKKPGKSPKLLIYGASSLQDGVPSRFSGSGSGTDYTLTISSLQPEDFATYFCQEGLKSPYTFGAGTKLEIKRTVAAPSVFIFPPSKKQLKSGTASVVCLLNNFYPREAKVQWKVDNALQSGNSQESVTEQDSKDSTYSLSSTLTLSKADYEKHKVYACEVTHQGLSSPVTKSFNRGEC

SEQ ID NO: 1047 - protein, 214 aa, synthetic construct
DIQMTQSPSSLSASVGDRVTITCKASRDVAIAVAWYQEKPGKVPKLLIYWASTRHTGVPSRFSGSGSRTDFTLTISSLQPEDVADYFCHQYSSYPFTFGSGTKLEIKRTVAAPSVFIAPPSDEQLKSGTASVVCLLNNFYPREAKVQWKVDNALQSGNSQESVTEQDSKDSTYSLSSTLTLSKADYEKHKVYACEVTHQGLSSPVTKSFNRGEC

SEQ ID NO: 1048 - protein, 443 aa, synthetic construct
EVQLVESGGGLVQPGGSLKLSCAASGFDIIDDYIHWVREASGKGLEWVGRIDPASANTKYVPSVKGRFTISADTSKNTAYLQMNSLKTEDTAVYYCTRKGFAYWGQGTLVTVSSASTKGPSVFPLAPSSKSTSGGTAALGCLVKDYFPEPVTVSWNSGALTSGVHTFPAVLQSSGLYSLSSVVTVPSSSLGTQTYICNVNHKPSDTKVDEKVEPDSCDKTHTCPPCPAPPVAGPSVFLFPPKPKDTLMISRTPEVTCVVVDVKHEDPEVKFNWYVDGVEVHNAKTKPREEEYNSTYRVVSVLTVLHQDWLNGKEYKCKVSNKALPAPIEKTISKAKGQPREPQVYTLPPSREEMTKNQVSLTCDVSGFYPSDIAVEWESDGQPENNYKTTPPVLDSDGSFFLYSKLTVDKSRWEQGDVFSCSVMHEALHNHYTQKSLSLSPGK

SEQ ID NO: 1049 - protein, 214 aa, synthetic construct
NIVMTQTPLSLSVTPGQPASISCKASENVGTYVSWYLKKPGQSPQLLIYGTSNRYTGVPDRFTGSGSATDFTLKISRVEAEDVGVYHCGQSYRYPYTFGGGTKLEIKRTVAAPSVFIFPPSKKQLKSGTASVVCLLNNFYPREAKVQWKVDNALQSGNSQESVTEQDSKDSTYSLSSTLTLSKADYEKHKVYACEVTHQGLSSPVTKSFNRGEC

SEQ ID NO: 1050 - protein, 449 aa, synthetic construct; identical to SEQ ID NO: 1045

SEQ ID NO: 1051 - protein, 214 aa, synthetic construct; identical to SEQ ID NO: 1047

SEQ ID NO: 1052 - protein, 448 aa, synthetic construct
EVQLVESGGGLVQPGGSLRLSCAASGFTFSSFGMHWVREAPGKGLEWVSYISSGSTTIYYADSVKGRFTISRDNAKNSLYLQMNSLRAEDTAVYYCARAPLLRGAMDYWGQGTLVTVSSASTKGPSVFPLAPSSKSTSGGTAALGCLVKDYFPEPVTVSWNSGALTSGVHTFPAVLQSSGLYSLSSVVTVPSSSLGTQTYICNVNHKPSDTKVDEKVEPDSCDKTHTCPPCPAPPVAGPSVFLFPPKPKDTLMISRTPEVTCVVVDVKHEDPEVKFNWYVDGVEVHNAKTKPREEEYNSTYRVVSVLTVLHQDWLNGKEYKCKVSNKALPAPIEKTISKAKGQPREPQVYTLPPSREEMTKNQVSLTCDVSGFYPSDIAVEWESDGQPENNYKTTPPVLDSDGSFFLYSKLTVDKSRWEQGDVFSCSVMHEALHNHYTQKSLSLSPGK

SEQ ID NO: 1053 - protein, 449 aa, synthetic construct; identical to SEQ ID NO: 1045

SEQ ID NO: 1054 - protein, 214 aa, synthetic construct
DIVMTQSPDSLAVSLGERATINCKASQDVSTAVVWYQKKPGQSPKLLIYWASTRHTGVPDRFTGSGSGTDYTLTISSLQAEDVAVYHCQQHYSTPYTFGGGTKLEIKRTVAAPSVFIFPPSKKQLKSGTASVVCLLNNFYPREAKVQWKVDNALQSGNSQESVTEQDSKDSTYSLSSTLTLSKADYEKHKVYACEVTHQGLSSPVTKSFNRGEC

SEQ ID NO: 1055 - protein, 214 aa, synthetic construct; identical to SEQ ID NO: 1047

SEQ ID NO: 1056 - protein, 453 aa, synthetic construct
QVQLVQSGAEVKKPGASVKVSCKVSGFSVTSYNVHWVREAPGQGLEWMGVMWSGGNTDYNSKFQGRVTMTRDTSTNTVYMELSSLRSEDTAVYYCARAGRYYHDSNYYWDFPYWGQGTLVTVSSASTKGPSVFPLAPSSKSTSGGTAALGCLVKDYFPEPVTVSWNSGALTSGVHTFPAVLQSSGLYSLSSVVTVPSSSLGTQTYICNVNHKPSDTKVDEKVEPDSCDKTHTCPPCPAPPVAGPSVFLFPPKPKDTLMISRTPEVTCVVVDVKHEDPEVKFNWYVDGVEVHNAKTKPREEEYNSTYRVVSVLTVLHQDWLNGKEYKCKVSNKALPAPIEKTISKAKGQPREPQVYTLPPSREEMTKNQVSLTCDVSGFYPSDIAVEWESDGQPENNYKTTPPVLDSDGSFFLYSKLTVDKSRWEQGDVFSCSVLHEALHSHYTQKSLSLSPGK

SEQ ID NO: 1057 - protein, 449 aa, synthetic construct
QVQLVQSGAEVKKPGSSVKVSCKASGYTFTDQTIHWMRKAPGQGLEWIGYIYPRDDSPKYNENFKGKVTITADKSTSTAYMELSSLRSEDTAVYYCAIPDRSGYAWFIYWGQGTLVTVSSASTKGPSVFPLAPSSKSTSGGTAFLGCLVKDYFPEPVTVSWNSGALTSGVHTFPAVLQSSGLYSLSSVVTVPSSSLGTQTYICNVNHKPSNTKVDKKVEPKSCDKTHTCPPCPAPPVAGPSVFLFPPKPKDTLMISRTPEVTCVVVDVKHEDPEVKFNWYVDGVEVHNAKTKPREEQYNSTYRVVSVLTVLHQDWLNGKEYKCKVSNKALPAPIEKTISKAKGQPREPQVYTLPPSREQMTKNQVKLTCLVKGFYPSDIAVEWESNGQPENNYKTTPPVLDSDGSFFLYSKLTVDKSRWQQGNVFSCSVLHEALHSHYTQKSLSLSPGK

SEQ ID NO: 1058 - protein, 214 aa, synthetic construct; identical to SEQ ID NO: 1046

SEQ ID NO: 1059 - protein, 214 aa, synthetic construct; identical to SEQ ID NO: 1047

SEQ ID NO: 1060 - protein, 443 aa, synthetic construct
EVQLVESGGGLVQPGGSLKLSCAASGFDIIDDYIHWVREASGKGLEWVGRIDPASANTKYVPSVKGRFTISADTSKNTAYLQMNSLKTEDTAVYYCTRKGFAYWGQGTLVTVSSASTKGPSVFPLAPSSKSTSGGTAALGCLVKDYFPEPVTVSWNSGALTSGVHTFPAVLQSSGLYSLSSVVTVPSSSLGTQTYICNVNHKPSDTKVDEKVEPDSCDKTHTCPPCPAPPVAGPSVFLFPPKPKDTLMISRTPEVTCVVVDVKHEDPEVKFNWYVDGVEVHNAKTKPREEEYNSTYRVVSVLTVLHQDWLNGKEYKCKVSNKALPAPIEKTISKAKGQPREPQVYTLPPSREEMTKNQVSLTCDVSGFYPSDIAVEWESDGQPENNYKTTPPVLDSDGSFFLYSKLTVDKSRWEQGDVFSCSVLHEALHSHYTQKSLSLSPGK

SEQ ID NO: 1061 - protein, 214 aa, synthetic construct; identical to SEQ ID NO: 1049

SEQ ID NO: 1062 - protein, 449 aa, synthetic construct; identical to SEQ ID NO: 1057

SEQ ID NO: 1063 - protein, 214 aa, synthetic construct; identical to SEQ ID NO: 1047

SEQ ID NO: 1064 - protein, 448 aa, synthetic construct
EVQLVESGGGLVQPGGSLRLSCAASGFTFSSFGMHWVREAPGKGLEWVSYISSGSTTIYYADSVKGRFTISRDNAKNSLYLQMNSLRAEDTAVYYCARAPLLRGAMDYWGQGTLVTVSSASTKGPSVFPLAPSSKSTSGGTAALGCLVKDYFPEPVTVSWNSGALTSGVHTFPAVLQSSGLYSLSSVVTVPSSSLGTQTYICNVNHKPSDTKVDEKVEPDSCDKTHTCPPCPAPPVAGPSVFLFPPKPKDTLMISRTPEVTCVVVDVKHEDPEVKFNWYVDGVEVHNAKTKPREEEYNSTYRVVSVLTVLHQDWLNGKEYKCKVSNKALPAPIEKTISKAKGQPREPQVYTLPPSREEMTKNQVSLTCDVSGFYPSDIAVEWESDGQPENNYKTTPPVLDSDGSFFLYSKLTVDKSRWEQGDVFSCSVLHEALHSHYTQKSLSLSPGK

SEQ ID NO: 1065 - protein, 449 aa, synthetic construct; identical to SEQ ID NO: 1057

SEQ ID NO: 1066 - protein, 214 aa, synthetic construct; identical to SEQ ID NO: 1054

SEQ ID NO: 1067 - protein, 214 aa, synthetic construct; identical to SEQ ID NO: 1047

SEQ ID NO: 1068 - protein, 450 aa, synthetic construct
QVQLVQSGAEVKKPGSSVKVSCKASGYTFTDQTIHWMREAPGQGLEWIGYIYPRDDSPKYNENFKGKVTITADKSTSTAYMELSSLRSEDTAVYYCAIPDRSGYAWFIYWGQGTLVTVSSASTKGPSVFPLAPSSKSTSGGTAALGCLVKDYFPEPVTVSWNSGALTSGVHTFPAVLQSSGLYSLSSVVTVPSSSLGTQTYICNVNHKPSDTKVDEKVEPDSCDKTHTCPPCPAPEAAGGPSVFLFPPKPKDTLMISRTPEVTCVVVDVSHEDPEVKFNWYVDGVEVHNAKTKPREEEYNSTYRVVSVLTVLHQDWLNGKEYKCKVSNKALAAPIEKTISKAKGQPREPQVYTLPPSREEMTKNQVSLTCDVSGFYPSDIAVEWESDGQPENNYKTTPPVLDSDGSFFLYSKLTVDKSRWEQGDVFSCSVLHEALHSHYTQKSLSLSPGK

SEQ ID NO: 1069 - protein, 454 aa, synthetic construct
QVQLVQSGAEVKKPGASVKVSCKVSGFSVTSYNVHWVRKAPGQGLEWMGVMWSGGNTDYNSKFQGRVTMTRDTSTNTVYMELSSLRSEDTAVYYCARAGRYYHDSNYYWDFPYWGQGTLVTVSSASTKGPSVFPLAPSSKSTSGGTAFLGCLVKDYFPEPVTVSWNSGALTSGVHTFPAVLQSSGLYSLSSVVTVPSSSLGTQTYICNVNHKPSNTKVDKKVEPKSCDKTHTCPPCPAPEAAGGPSVFLFPPKPKDTLMISRTPEVTCVVVDVSHEDPEVKFNWYVDGVEVHNAKTKPREEQYNSTYRVVSVLTVLHQDWLNGKEYKCKVSNKALAAPIEKTISKAKGQPREPQVYTLPPSREQMTKNQVKLTCLVKGFYPSDIAVEWESNGQPENNYKTTPPVLDSDGSFFLYSKLTVDKSRWQQGNVFSCSVLHEALHSHYTQKSLSLSPGK

SEQ ID NO: 1070 - protein, 214 aa, synthetic construct; identical to SEQ ID NO: 1022

SEQ ID NO: 1071 - protein, 214 aa, synthetic construct; identical to SEQ ID NO: 1023

SEQ ID NO: 1072 - protein, 453 aa, synthetic construct
QVQLVQSGAEVKKPGASVKVSCKVSGFSVTSYNVHWVREAPGQGLEWMGVMWSGGNTDYNDKFQGRVTMTRDTSTNTVYMELSSLRSEDTAVYYCARAGRYYHDSNYYWDFPYWGQGTLVTVSSASTKGPSVFPLAPSSKSTSGGTAALGCLVKDYFPEPVTVSWNSGALTSGVHTFPAVLQSSGLYSLSSVVTVPSSSLGTQTYICNVNHKPSDTKVDEKVEPDSCDKTHTCPPCPAPPVAGPSVFLFPPKPKDTLMISRTPEVTCVVVDVKHEDPEVKFNWYVDGVEVHNAKTKPREEEYNSTYRVVSVLTVLHQDWLNGKEYKCKVSNKALPAPIEKTISKAKGQPREPQVYTLPPSREEMTKNQVSLTCDVSGFYPSDIAVEWESDGQPENNYKTTPPVLDSDGSFFLYSKLTVDKSRWEQGDVFSCSVLHEALHSHYTQKSLSLSPGK

SEQ ID NO: 1073 - protein, 449 aa, synthetic construct; identical to SEQ ID NO: 1057

SEQ ID NO: 1074 - protein, 214 aa, synthetic construct; identical to SEQ ID NO: 1046

SEQ ID NO: 1075 - protein, 214 aa, synthetic construct; identical to SEQ ID NO: 1047

SEQ ID NO: 1076 - protein, 449 aa, synthetic construct; identical to SEQ ID NO: 1032

SEQ ID NO: 1077 - protein, 453 aa, synthetic construct
QVQLVQSGAEVKKPGASVKVSCKVSGFSVTSYNVHWVRKAPGQGLEWMGVMWSGGNTDYNDKFQGRVTMTRDTSTNTVYMELSSLRSEDTAVYYCARAGRYYHDSNYYWDFPYWGQGTLVTVSSASTKGPSVFPLAPSSKSTSGGTAFLGCLVKDYFPEPVTVSWNSGALTSGVHTFPAVLQSSGLYSLSSVVTVPSSSLGTQTYICNVNHKPSNTKVDKKVEPKSCDKTHTCPPCPAPPVAGPSVFLFPPKPKDTLMISRTPEVTCVVVDVKHEDPEVKFNWYVDGVEVHNAKTKPREEQYNSTYRVVSVLTVLHQDWLNGKEYKCKVSNKALPAPIEKTISKAKGQPREPQVYTLPPSREQMTKNQVKLTCLVKGFYPSDIAVEWESNGQPENNYKTTPPVLDSDGSFFLYSKLTVDKSRWQQGNVFSCSVLHEALHSHYTQKSLSLSPGK

SEQ ID NO: 1078 - protein, 214 aa, synthetic construct; identical to SEQ ID NO: 1022

SEQ ID NO: 1079 - protein, 214 aa, synthetic construct; identical to SEQ ID NO: 1023

SEQ ID NO: 1080 - protein, 453 aa, synthetic construct
QVQLVQSGAEVKKPGASVKVSCKVSGFSVTSYNVHWVREAPGQGLEWMGVMWSGGNTDYNSKFQGRVTMTRDTSTNTVYMELSSLRSEDTAVYYCARAGRYYHDSNYYWDFPYWGQGTLVTVSSASTKGPSVFPLAPSSKSTSGGTAALGCLVKDYFPEPVTVSWNSGALTSGVHTFPAVLQSSGLYSLSSVVTVPSSSLGTQTYICNVNHKPSDTKVDEKVEPDSCDKTHTCPPCPAPPVAGPSVFLFPPKPKDTLYITREPEVTCVVVDVKHEDPEVKFNWYVDGVEVHNAKTKPREEEYNSTYRVVSVLTVLHQDWLNGKEYKCKVSNKALPAPIEKTISKAKGQPREPQVYTLPPSREEMTKNQVSLTCDVSGFYPSDIAVEWESDGQPENNYKTTPPVLDSDGSFFLYSKLTVDKSRWEQGDVFSCSVMHEALHNHYTQKSLSLSPGK

SEQ ID NO: 1081 - protein, 449 aa, synthetic construct
QVQLVQSGAEVKKPGSSVKVSCKASGYTFTDQTIHWMRKAPGQGLEWIGYIYPRDDSPKYNENFKGKVTITADKSTSTAYMELSSLRSEDTAVYYCAIPDRSGYAWFIYWGQGTLVTVSSASTKGPSVFPLAPSSKSTSGGTAFLGCLVKDYFPEPVTVSWNSGALTSGVHTFPAVLQSSGLYSLSSVVTVPSSSLGTQTYICNVNHKPSNTKVDKKVEPKSCDKTHTCPPCPAPPVAGPSVFLFPPKPKDTLYITREPEVTCVVVDVKHEDPEVKFNWYVDGVEVHNAKTKPREEQYNSTYRVVSVLTVLHQDWLNGKEYKCKVSNKALPAPIEKTISKAKGQPREPQVYTLPPSREQMTKNQVKLTCLVKGFYPSDIAVEWESNGQPENNYKTTPPVLDSDGSFFLYSKLTVDKSRWQQGNVFSCSVMHEALHNHYTQKSLSLSPGK

SEQ ID NO: 1082 - protein, 214 aa, synthetic construct; identical to SEQ ID NO: 1046

SEQ ID NO: 1083 - protein, 214 aa, synthetic construct; identical to SEQ ID NO: 1047

SEQ ID NO: 1084 - protein, 453 aa, synthetic construct
QVQLVQSGAEVKKPGASVKVSCKVSGFPVTSYNVHWVREAPGQGLEWMGVMWYGGNTDYNSKFQGRVTMTRDTSTNTVYMELSSLRSEDTAVYYCARAGRYYHDSNYYWDFPYWGQGTLVTVSSASTKGPSVFPLAPSSKSTSGGTAALGCLVKDYFPEPVTVSWNSGALTSGVHTFPAVLQSSGLYSLSSVVTVPSSSLGTQTYICNVNHKPSDTKVDEKVEPDSCDKTHTCPPCPAPPVAGPSVFLFPPKPKDTLMISRTPEVTCVVVDVKHEDPEVKFNWYVDGVEVHNAKTKPREEEYNSTYRVVSVLTVLHQDWLNGKEYKCKVSNKALPAPIEKTISKAKGQPREPQVYTLPPSREEMTKNQVSLTCDVSGFYPSDIAVEWESDGQPENNYKTTPPVLDSDGSFFLYSKLTVDKSRWEQGDVFSCSVLHEALHSHYTQKSLSLSPGK

SEQ ID NO: 1085 - protein, 449 aa, synthetic construct; identical to SEQ ID NO: 1057

SEQ ID NO: 1086 - protein, 214 aa, synthetic construct
DIQMTQSPSSVSASVGDRVTITCRASEDIYSGLAWYQKKPGKSPKLLIYGASSLQDGVPSRFSGSGSGTDYTLTISSLQPEDFATYFCQEGLKSPYTFGQGTKLEIKRTVAAPSVFIFPPSKKQLKSGTASVVCLLNNFYPREAKVQWKVDNALQSGNSQESVTEQDSKDSTYSLSSTLTLSKADYEKHKVYACEVTHQGLSSPVTKSFNRGEC

SEQ ID NO: 1087 - protein, 214 aa, synthetic construct
DIQMTQSPSSLSASVGDRVTITCKASRDVAIAVAWYQEKPGKVPKLLIYWASVRHTGVPSRFSGSGSRTDFTLTISSLQPEDVADYFCYQYSSYPFTFGSGTKLEIKRTVAAPSVFIAPPSDEQLKSGTASVVCLLNNFYPREAKVQWKVDNALQSGNSQESVTEQDSKDSTYSLSSTLTLSKADYEKHKVYACEVTHQGLSSPVTKSFNRGEC

SEQ ID NO: 1088 - protein, 453 aa, synthetic construct; identical to SEQ ID NO: 1084

SEQ ID NO: 1089 - protein, 449 aa, synthetic construct
QVQLVQSGAEVKKPGSSVKVSCKASGYTFTDQTIHWMRKAPGQGLEWIGYIYPRDDSPKYNENFKGKVTITADKSTSTAYMELSSLRSEDTAVYYCAIPDRSGYAFFIYWGQGTLVTVSSASTKGPSVFPLAPSSKSTSGGTAFLGCLVKDYFPEPVTVSWNSGALTSGVHTFPAVLQSSGLYSLSSVVTVPSSSLGTQTYICNVNHKPSNTKVDKKVEPKSCDKTHTCPPCPAPPVAGPSVFLFPPKPKDTLMISRTPEVTCVVVDVKHEDPEVKFNWYVDGVEVHNAKTKPREEQYNSTYRVVSVLTVLHQDWLNGKEYKCKVSNKALPAPIEKTISKAKGQPREPQVYTLPPSREQMTKNQVKLTCLVKGFYPSDIAVEWESNGQPENNYKTTPPVLDSDGSFFLYSKLTVDKSRWQQGNVFSCSVLHEALHSHYTQKSLSLSPGK

SEQ ID NO: 1090 - protein, 214 aa, synthetic construct; identical to SEQ ID NO: 1086

SEQ ID NO: 1091 - protein, 214 aa, synthetic construct
DIQMTQSPSSLSASVGDRVTITCKASRDVAIAVAWYQEKPGKVPKLLIYWASQRHTGVPSRFSGSGSRTDFTLTISSLQPEDVADYFCYQYSSYPFTFGSGTKLEIKRTVAAPSVFIAPPSDEQLKSGTASVVCLLNNFYPREAKVQWKVDNALQSGNSQESVTEQDSKDSTYSLSSTLTLSKADYEKHKVYACEVTHQGLSSPVTKSFNRGEC

SEQ ID NO: 1092 - protein, 453 aa, synthetic construct; identical to SEQ ID NO: 1084

SEQ ID NO: 1093 - protein, 449 aa, synthetic construct
QVQLVQSGAEVKKPGSSVKVSCKASGYTFTDQTLHWMRKAPGQGLEWIGYIYPRDDSPKYNENFKGKVTITADKSTSTAYMELSSLRSEDTAVYYCAIPDRSGYAWFIYWGQGTLVTVSSASTKGPSVFPLAPSSKSTSGGTAFLGCLVKDYFPEPVTVSWNSGALTSGVHTFPAVLQSSGLYSLSSVVTVPSSSLGTQTYICNVNHKPSNTKVDKKVEPKSCDKTHTCPPCPAPPVAGPSVFLFPPKPKDTLMISRTPEVTCVVVDVKHEDPEVKFNWYVDGVEVHNAKTKPREEQYNSTYRVVSVLTVLHQDWLNGKEYKCKVSNKALPAPIEKTISKAKGQPREPQVYTLPPSREQMTKNQVKLTCLVKGFYPSDIAVEWESNGQPENNYKTTPPVLDSDGSFFLYSKLTVDKSRWQQGNVFSCSVLHEALHSHYTQKSLSLSPGK

SEQ ID NO: 1094 - protein, 214 aa, synthetic construct; identical to SEQ ID NO: 1086

SEQ ID NO: 1095 - protein, 214 aa, synthetic construct; identical to SEQ ID NO: 1087

SEQ ID NO: 1096 - protein, 453 aa, synthetic construct
QVQLVQSGAEVKKPGASVKVSCKVSGFSVTSYNVHWVREAPGQGLEWMGVMWFGGNTDYNSKFQGRVTMTRDTSTNTVYMELSSLRSEDTAVYYCARAGRYYHDSNYYWDFPYWGQGTLVTVSSASTKGPSVFPLAPSSKSTSGGTAALGCLVKDYFPEPVTVSWNSGALTSGVHTFPAVLQSSGLYSLSSVVTVPSSSLGTQTYICNVNHKPSDTKVDEKVEPDSCDKTHTCPPCPAPPVAGPSVFLFPPKPKDTLMISRTPEVTCVVVDVKHEDPEVKFNWYVDGVEVHNAKTKPREEEYNSTYRVVSVLTVLHQDWLNGKEYKCKVSNKALPAPIEKTISKAKGQPREPQVYTLPPSREEMTKNQVSLTCDVSGFYPSDIAVEWESDGQPENNYKTTPPVLDSDGSFFLYSKLTVDKSRWEQGDVFSCSVLHEALHSHYTQKSLSLSPGK

SEQ ID NO: 1097 - protein, 449 aa, synthetic construct; identical to SEQ ID NO: 1057

SEQ ID NO: 1098 - protein, 214 aa, synthetic construct; identical to SEQ ID NO: 1086

SEQ ID NO: 1099 - protein, 214 aa, synthetic construct; identical to SEQ ID NO: 1087

SEQ ID NO: 1100 - protein, 453 aa, synthetic construct; identical to SEQ ID NO: 1096

SEQ ID NO: 1101 - protein, 449 aa, synthetic construct; identical to SEQ ID NO: 1089

SEQ ID NO: 1102 - protein, 214 aa, synthetic construct; identical to SEQ ID NO: 1086

SEQ ID NO: 1103 - protein, 214 aa, synthetic construct; identical to SEQ ID NO: 1091

SEQ ID NO: 1104 - protein, 453 aa, synthetic construct; identical to SEQ ID NO: 1096

SEQ ID NO: 1105 - protein, 449 aa, synthetic construct; identical to SEQ ID NO: 1093

SEQ ID NO: 1106 - protein, 214 aa, synthetic construct; identical to SEQ ID NO: 1086

SEQ ID NO: 1107 - protein, 214 aa, synthetic construct; identical to SEQ ID NO: 1087

SEQ ID NO: 1108 - protein, 453 aa, synthetic construct
QVQLVQSGAEVKKPGASVKVSCKVSGFSVTRYNVHWVREAPGQGLEWMGVMWSGANTDYNSKFQGRVTMTRDTSTNTVYMELSSLRSEDTAVYYCARAGRYYVDSNYYWDFPYWGQGTLVTVSSASTKGPSVFPLAPSSKSTSGGTAALGCLVKDYFPEPVTVSWNSGALTSGVHTFPAVLQSSGLYSLSSVVTVPSSSLGTQTYICNVNHKPSDTKVDEKVEPDSCDKTHTCPPCPAPPVAGPSVFLFPPKPKDTLMISRTPEVTCVVVDVKHEDPEVKFNWYVDGVEVHNAKTKPREEEYNSTYRVVSVLTVLHQDWLNGKEYKCKVSNKALPAPIEKTISKAKGQPREPQVYTLPPSREEMTKNQVSLTCDVSGFYPSDIAVEWESDGQPENNYKTTPPVLDSDGSFFLYSKLTVDKSRWEQGDVFSCSVLHEALHSHYTQKSLSLSPGK

SEQ ID NO: 1109 - protein, 449 aa, synthetic construct; identical to SEQ ID NO: 1057

SEQ ID NO: 1110 - protein, 214 aa, synthetic construct; identical to SEQ ID NO: 1086

SEQ ID NO: 1111 - protein, 214 aa, synthetic construct; identical to SEQ ID NO: 1087

SEQ ID NO: 1112 - protein, 453 aa, synthetic construct; identical to SEQ ID NO: 1108

SEQ ID NO: 1113 - protein, 449 aa, synthetic construct; identical to SEQ ID NO: 1089

SEQ ID NO: 1114 - protein, 214 aa, synthetic construct; identical to SEQ ID NO: 1086

SEQ ID NO: 1115 - protein, 214 aa, synthetic construct; identical to SEQ ID NO: 1091

SEQ ID NO: 1116 - protein, 453 aa, synthetic construct; identical to SEQ ID NO: 1108

SEQ ID NO: 1117 - protein, 449 aa, synthetic construct; identical to SEQ ID NO: 1093

SEQ ID NO: 1118 - protein, 214 aa, synthetic construct; identical to SEQ ID NO: 1086

SEQ ID NO: 1119 - protein, 214 aa, synthetic construct; identical to SEQ ID NO: 1087

SEQ ID NO: 1120 - protein, 453 aa, synthetic construct
QVQLVQSGAEVKKPGASVKVSCKVSGFSVTSYNVHWVREAPGQGLEWMGVMWRGGNTDYNSKFQGRVTMTRDTSTNTVYMELSSLRSEDTAVYYCARAGRYYHDSNYYWDFPYWGQGTLVTVSSASTKGPSVFPLAPSSKSTSGGTAALGCLVKDYFPEPVTVSWNSGALTSGVHTFPAVLQSSGLYSLSSVVTVPSSSLGTQTYICNVNHKPSDTKVDEKVEPDSCDKTHTCPPCPAPPVAGPSVFLFPPKPKDTLMISRTPEVTCVVVDVKHEDPEVKFNWYVDGVEVHNAKTKPREEEYNSTYRVVSVLTVLHQDWLNGKEYKCKVSNKALPAPIEKTISKAKGQPREPQVYTLPPSREEMTKNQVSLTCDVSGFYPSDIAVEWESDGQPENNYKTTPPVLDSDGSFFLYSKLTVDKSRWEQGDVFSCSVLHEALHSHYTQKSLSLSPGK

SEQ ID NO: 1121 - protein, 449 aa, synthetic construct; identical to SEQ ID NO: 1057

SEQ ID NO: 1122 - protein, 214 aa, synthetic construct; identical to SEQ ID NO: 1086

SEQ ID NO: 1123 - protein, 214 aa, synthetic construct; identical to SEQ ID NO: 1087

SEQ ID NO: 1124 - protein, 453 aa, synthetic construct; identical to SEQ ID NO: 1120

SEQ ID NO: 1125 - protein, 449 aa, synthetic construct; identical to SEQ ID NO: 1089

SEQ ID NO: 1126 - protein, 214 aa, synthetic construct; identical to SEQ ID NO: 1086

SEQ ID NO: 1127 - protein, 214 aa, synthetic construct; identical to SEQ ID NO: 1091

SEQ ID NO: 1128 - protein, 453 aa, synthetic construct; identical to SEQ ID NO: 1120

SEQ ID NO: 1129 - protein, 449 aa, synthetic construct; identical to SEQ ID NO: 1093

SEQ ID NO: 1130 - protein, 214 aa, synthetic construct; identical to SEQ ID NO: 1086

SEQ ID NO: 1131 - protein, 214 aa, synthetic construct; identical to SEQ ID NO: 1087

SEQ ID NO: 1132 - protein, 453 aa, synthetic construct
QVQLVQSGAEVKKPGASVKVSCKVSGFSVTSYNVHWVREAPGQGLEWMGVMWYGGNTDYNSKFQGRVTMTRDTSTNTVYMELSSLRSEDTAVYYCARAGRYYVDSNYYWDFPYWGQGTLVTVSSASTKGPSVFPLAPSSKSTSGGTAALGCLVKDYFPEPVTVSWNSGALTSGVHTFPAVLQSSGLYSLSSVVTVPSSSLGTQTYICNVNHKPSDTKVDEKVEPDSCDKTHTCPPCPAPPVAGPSVFLFPPKPKDTLMISRTPEVTCVVVDVKHEDPEVKFNWYVDGVEVHNAKTKPREEEYNSTYRVVSVLTVLHQDWLNGKEYKCKVSNKALPAPIEKTISKAKGQPREPQVYTLPPSREEMTKNQVSLTCDVSGFYPSDIAVEWESDGQPENNYKTTPPVLDSDGSFFLYSKLTVDKSRWEQGDVFSCSVLHEALHSHYTQKSLSLSPGK

SEQ ID NO: 1133 - protein, 449 aa, synthetic construct; identical to SEQ ID NO: 1057

SEQ ID NO: 1134 - protein, 214 aa, synthetic construct; identical to SEQ ID NO: 1086

SEQ ID NO: 1135 - protein, 214 aa, synthetic construct; identical to SEQ ID NO: 1087

SEQ ID NO: 1136 - protein, 453 aa, synthetic construct; identical to SEQ ID NO: 1132

SEQ ID NO: 1137 - protein, 449 aa, synthetic construct; identical to SEQ ID NO: 1089

SEQ ID NO: 1138 - protein, 214 aa, synthetic construct; identical to SEQ ID NO: 1086

SEQ ID NO: 1139 - protein, 214 aa, synthetic construct; identical to SEQ ID NO: 1091

SEQ ID NO: 1140 - protein, 453 aa, synthetic construct; identical to SEQ ID NO: 1132

SEQ ID NO: 1141 - protein, 449 aa, synthetic construct; identical to SEQ ID NO: 1093

SEQ ID NO: 1142 - protein, 214 aa, synthetic construct; identical to SEQ ID NO: 1086

SEQ ID NO: 1143 - protein, 214 aa, synthetic construct; identical to SEQ ID NO: 1087

SEQ ID NO: 1144 - protein, 448 aa, synthetic construct; identical to SEQ ID NO: 1064

SEQ ID NO: 1145 - protein, 449 aa, synthetic construct; identical to SEQ ID NO: 1057

SEQ ID NO: 1146 - protein, 214 aa, synthetic construct; identical to SEQ ID NO: 1054

SEQ ID NO: 1147 - protein, 214 aa, synthetic construct; identical to SEQ ID NO: 1087

SEQ ID NO: 1148 - protein, 448 aa, synthetic construct; identical to SEQ ID NO: 1064

SEQ ID NO: 1149 - protein, 449 aa, synthetic construct; identical to SEQ ID NO: 1089

SEQ ID NO: 1150 - protein, 214 aa, synthetic construct; identical to SEQ ID NO: 1054

SEQ ID NO: 1151 - protein, 214 aa, synthetic construct; identical to SEQ ID NO: 1091

SEQ ID NO: 1152 - protein, 453 aa, synthetic construct
QVQLVQSGAEVKKPGASVKVSCKVSGFSVTSYNVHWVREAPGQGLEWMGVMWYGGNTDYNSKFQGRVTMTRDTSTNTVYMELSSLRSEDTAVYYCARAGRYYVDSNYYWDFPYWGQGTLVTVSSASTKGPSVFPLAPSSKSTSGGTAALGCLVKDYFPEPVTVSWNSGALTSGVHTFPAVLQSSGLYSLSSVVTVPSSSLGTQTYICNVNHKPSDTKVDEKVEPDSCDKTHTCPPCPAPPVAGPSVFLFPPKPKDTLMISRTPEVTCVVVDVKHEDPEVKFNWYVDGVEVHNAKTKPREEEYNSTYRVVSVLTVLHQDWLNGKEYKCKVSNKALPAPIEKTISKAKGQPREPQVYTLPPSREEMTKNQVSLTCDVSGFYPSDIAVEWESDGQPENNYKTTPPVLDSDGSFFLYSKLTVDKSRWEQGDVFSCSVMHEALHNHYTQKSLSLSPGK

SEQ ID NO: 1153 - protein, 449 aa, synthetic construct; identical to SEQ ID NO: 1045

SEQ ID NO: 1154 - protein, 214 aa, synthetic construct; identical to SEQ ID NO: 1086

SEQ ID NO: 1155 - protein, 214 aa, synthetic construct; identical to SEQ ID NO: 1087

SEQ ID NO: 1156 - protein, 449 aa, synthetic construct; identical to SEQ ID NO: 189

SEQ ID NO: 1157 - protein, 453 aa, synthetic construct
QVQLVQSGAEVKKPGASVKVSCKVSGFSVTSYNVHWVRQAPGQGLEWMGVMWSGGNTDYNSKFQGRVTMTRDTSTNTVYMELSSLRSEDTAVYYCARAGRYYHDSNYYWDFPYWGQGTLVTVSSASTKGPSVFPLAPSSKSTSGGTAALGCLVKDYFPEPVTVSWNSGALTSGVHTFPAVLQSSGLYSLSSVVTVPSSSLGTQTYICNVNHKPSNTKVDKKVEPKSCDKTHTCPPCPAPPVAGPSVFLFPPKPKDTLMISRTPEVTCVVVDVKHEDPEVKFNWYVDGVEVHNAKTKPREEQYNSTYRVVSVLTVLHQDWLNGKEYKCKVSNKALPAPIEKTISKAKGQPREPQVYTLPPSREQMTKNQVKLTCLVKGFYPSDIAVEWESNGQPENNYKTTPPVLDSDGSFFLYSKLTVDKSRWQQGNVFSCSVLHEALHSHYTQKSLSLSPGK

SEQ ID NO: 1158 - protein, 214 aa, synthetic construct
DIQMTQSPSSLSASVGDRVTITCKASEDIYSGVAWYQQKPGKVPKLLIYWASTRHTGVPSRFSGSGSRTDFTLTISSLQPEDVADYFCHQGLKSPYTFGSGTKLEIKRTVAAPSVFIFPPSDEQLKSGTASVVCLLNNFYPREAKVQWKVDNALQSGNSQESVTEQDSKDSTYSLSSTLTLSKADYEKHKVYACEVTHQGLSSPVTKSFNRGEC

SEQ ID NO: 1159 - protein, 453 aa, synthetic construct; identical to SEQ ID NO: 276

SEQ ID NO: 1160 - protein, 449 aa, synthetic construct
QVQLVQSGAEVKKPGSSVKVSCKASGYTFTDQTIHWMRQAPGQGLEWIGYIYPRDDSPKYNENFKGKVTITADKSTSTAYMELSSLRSEDTAVYYCAIPDRSGYAWFIYWGQGTLVTVSSASTKGPSVFPLAPSSKSTSGGTAALGCLVKDYFPEPVTVSWNSGALTSGVHTFPAVLQSSGLYSLSSVVTVPSSSLGTQTYICNVNHKPSNTKVDKKVEPKSCDKTHTCPPCPAPPVAGPSVFLFPPKPKDTLMISRTPEVTCVVVDVKHEDPEVKFNWYVDGVEVHNAKTKPREEQYNSTYRVVSVLTVLHQDWLNGKEYKCKVSNKALPAPIEKTISKAKGQPREPQVYTLPPSREQMTKNQVKLTCLVKGFYPSDIAVEWESNGQPENNYKTTPPVLDSDGSFFLYSKLTVDKSRWQQGNVFSCSVLHEALHSHYTQKSLSLSPGK

SEQ ID NO: 1161 - protein, 214 aa, synthetic construct; identical to SEQ ID NO: 1158

SEQ ID NO: 1162 - protein, 449 aa, synthetic construct; identical to SEQ ID NO: 189

SEQ ID NO: 1163 - protein, 714 aa, synthetic construct
QVQLVQSGAEVKKPGSSVKVSCKASGYTFTDQTIHWMRQAPGQGLEWIGYIYPRDDSPKYNENFKGKVTITADKSTSTAYMELSSLRSEDTAVYYCAIPDRSGYAWFIYWGQGTLVTVSSASTKGPSVFPLAPSSKSTSGGTAALGCLVKDYFPEPVTVSWNSGALTSGVHTFPAVLQSSGLYSLSSVVTVPSSSLGTQTYICNVNHKPSNTKVDKKVEPKSCDKTHTCPPCPAPPVAGPSVFLFPPKPKDTLMISRTPEVTCVVVDVKHEDPEVKFNWYVDGVEVHNAKTKPREEQYNSTYRVVSVLTVLHQDWLNGKEYKCKVSNKALPAPIEKTISKAKGQPREPQVYTLPPSREQMTKNQVKLTCLVKGFYPSDIAVEWESNGQPENNYKTTPPVLDSDGSFFLYSKLTVDKSRWQQGNVFSCSVLHEALHSHYTQKSLSLSPGGGGGSGGGGSGGGGSQVQLVQSGAEVKKPGASVKVSCKVSGFSVTSYNVHWVRQAPGQCLEWMGVMWSGGNTDYNSKFQGRVTMTRDTSTNTVYMELSSLRSEDTAVYYCARAGRYYHDSNYYWDFPYWGQGTLVTVSSGKPGSGKPGSGKPGSGKPGSDIQMTQSPSSVSASVGDRVTITCRASEDIYSGLAWYQQKPGKSPKLLIYGASSLQDGVPSRFSGSGSGTDYTLTISSLQPEDFATYFCQEGLKSPYTFGCGTKLEIK

SEQ ID NO: 1164 - protein, 214 aa, synthetic construct; identical to SEQ ID NO: 178

SEQ ID NO: 1165 - protein, 449 aa, synthetic construct; identical to SEQ ID NO: 189

SEQ ID NO: 1166 - protein, 719 aa, synthetic construct
QVQLVQSGAEVKKPGSSVKVSCKASGYTFTDQTIHWMRQAPGQGLEWIGYIYPRDDSPKYNENFKGKVTITADKSTSTAYMELSSLRSEDTAVYYCAIPDRSGYAWFIYWGQGTLVTVSSASTKGPSVFPLAPSSKSTSGGTAALGCLVKDYFPEPVTVSWNSGALTSGVHTFPAVLQSSGLYSLSSVVTVPSSSLGTQTYICNVNHKPSNTKVDKKVEPKSCGGGGSGGGGSQVQLVQSGAEVKKPGASVKVSCKVSGFSVTSYNVHWVRQAPGQCLEWMGVMWSGGNTDYNSKFQGRVTMTRDTSTNTVYMELSSLRSEDTAVYYCARAGRYYHDSNYYWDFPYWGQGTLVTVSSGKPGSGKPGSGKPGSGKPGSDIQMTQSPSSVSASVGDRVTITCRASEDIYSGLAWYQQKPGKSPKLLIYGASSLQDGVPSRFSGSGSGTDYTLTISSLQPEDFATYFCQEGLKSPYTFGCGTKLEIKGGGGSGGGGSKTHTCPPCPAPPVAGPSVFLFPPKPKDTLMISRTPEVTCVVVDVKHEDPEVKFNWYVDGVEVHNAKTKPREEQYNSTYRVVSVLTVLHQDWLNGKEYKCKVSNKALPAPIEKTISKAKGQPREPQVYTLPPSREQMTKNQVKLTCLVKGFYPSDIAVEWESNGQPENNYKTTPPVLDSDGSFFLYSKLTVDKSRWQQGNVFSCSVLHEALHSHYTQKSLSLSPGK

SEQ ID NO: 1167 - protein, 214 aa, synthetic construct; identical to SEQ ID NO: 178

SEQ ID NO: 1168 - protein, 714 aa, synthetic construct
QVQLVQSGAEVKKPGSSVKVSCKASGYTFTDQTIHWMRQAPGQGLEWIGYIYPRDDSPKYNENFKGKVTITADKSTSTAYMELSSLRSEDTAVYYCAIPDRSGYAWFIYWGQGTLVTVSSASTKGPSVFPLAPSSKSTSGGTAALGCLVKDYFPEPVTVSWNSGALTSGVHTFPAVLQSSGLYSLSSVVTVPSSSLGTQTYICNVNHKPSNTKVDKKVEPKSCDKTHTCPPCPAPPVAGPSVFLFPPKPKDTLMISRTPEVTCVVVDVKHEDPEVKFNWYVDGVEVHNAKTKPREEQYNSTYRVVSVLTVLHQDWLNGKEYKCKVSNKALPAPIEKTISKAKGQPREPQVYTLPPSREEMTKNQVSLTCLVKGFYPSDIAVEWESNGQPENNYKTTPPVLDSDGSFFLYSKLTVDKSRWQQGNVFSCSVLHEALHSHYTQKSLSLSPGGGGGSGGGGSGGGGSQVQLVQSGAEVKKPGASVKVSCKVSGFSVTSYNVHWVRQAPGQCLEWMGVMWSGGNTDYNSKFQGRVTMTRDTSTNTVYMELSSLRSEDTAVYYCARAGRYYHDSNYYWDFPYWGQGTLVTVSSGGGGSGGGGSGGGGSGGGGSDIQMTQSPSSVSASVGDRVTITCRASEDIYSGLAWYQQKPGKSPKLLIYGASSLQDGVPSRFSGSGSGTDYTLTISSLQPEDFATYFCQEGLKSPYTFGCGTKLEIK

SEQ ID NO: 1169 - protein, 214 aa, synthetic construct; identical to SEQ ID NO: 178

SEQ ID NO: 1170 - protein, 714 aa, synthetic construct
QVQLVQSGAEVKKPGASVKVSCKVSGFSVTSYNVHWVRQAPGQGLEWMGVMWSGGNTDYNSKFQGRVTMTRDTSTNTVYMELSSLRSEDTAVYYCARAGRYYHDSNYYWDFPYWGQGTLVTVSSASTKGPSVFPLAPSSKSTSGGTAALGCLVKDYFPEPVTVSWNSGALTSGVHTFPAVLQSSGLYSLSSVVTVPSSSLGTQTYICNVNHKPSNTKVDKKVEPKSCDKTHTCPPCPAPPVAGPSVFLFPPKPKDTLMISRTPEVTCVVVDVKHEDPEVKFNWYVDGVEVHNAKTKPREEQYNSTYRVVSVLTVLHQDWLNGKEYKCKVSNKALPAPIEKTISKAKGQPREPQVYTLPPSREEMTKNQVSLTCLVKGFYPSDIAVEWESNGQPENNYKTTPPVLDSDGSFFLYSKLTVDKSRWQQGNVFSCSVLHEALHSHYTQKSLSLSPGGGGGSGGGGSGGGGSQVQLVQSGAEVKKPGSSVKVSCKASGYTFTDQTIHWMRQAPGQCLEWIGYIYPRDDSPKYNENFKGKVTITADKSTSTAYMELSSLRSEDTAVYYCAIPDRSGYAWFIYWGQGTLVTVSSGGGGSGGGGSGGGGSGGGGSDIQMTQSPSSLSASVGDRVTITCKASRDVAIAVAWYQQKPGKVPKLLIYWASTRHTGVPSRFSGSGSRTDFTLTISSLQPEDVADYFCHQYSSYPFTFGCGTKLEIK

SEQ ID NO: 1171 - protein, 214 aa, synthetic construct; identical to SEQ ID NO: 278

SEQ ID NO: 1172 - protein, 719 aa, synthetic construct
QVQLVQSGAEVKKPGSSVKVSCKASGYTFTDQTIHWMRQAPGQGLEWIGYIYPRDDSPKYNENFKGKVTITADKSTSTAYMELSSLRSEDTAVYYCAIPDRSGYAWFIYWGQGTLVTVSSASTKGPSVFPLAPSSKSTSGGTAALGCLVKDYFPEPVTVSWNSGALTSGVHTFPAVLQSSGLYSLSSVVTVPSSSLGTQTYICNVNHKPSNTKVDKKVEPKSCGGGGSGGGGSQVQLVQSGAEVKKPGASVKVSCKVSGFSVTSYNVHWVRQAPGQCLEWMGVMWSGGNTDYNSKFQGRVTMTRDTSTNTVYMELSSLRSEDTAVYYCARAGRYYHDSNYYWDFPYWGQGTLVTVSSGGGGSGGGGSGGGGSGGGGSDIQMTQSPSSVSASVGDRVTITCRASEDIYSGLAWYQQKPGKSPKLLIYGASSLQDGVPSRFSGSGSGTDYTLTISSLQPEDFATYFCQEGLKSPYTFGCGTKLEIKGGGGSGGGGSKTHTCPPCPAPPVAGPSVFLFPPKPKDTLMISRTPEVTCVVVDVKHEDPEVKFNWYVDGVEVHNAKTKPREEQYNSTYRVVSVLTVLHQDWLNGKEYKCKVSNKALPAPIEKTISKAKGQPREPQVYTLPPSREEMTKNQVSLTCLVKGFYPSDIAVEWESNGQPENNYKTTPPVLDSDGSFFLYSKLTVDKSRWQQGNVFSCSVLHEALHSHYTQKSLSLSPGK

SEQ ID NO: 1173 - protein, 214 aa, synthetic construct; identical to SEQ ID NO: 178

SEQ ID NO: 1174 - protein, 719 aa, synthetic construct
QVQLVQSGAEVKKPGASVKVSCKVSGFSVTSYNVHWVRQAPGQGLEWMGVMWSGGNTDYNSKFQGRVTMTRDTSTNTVYMELSSLRSEDTAVYYCARAGRYYHDSNYYWDFPYWGQGTLVTVSSASTKGPSVFPLAPSSKSTSGGTAALGCLVKDYFPEPVTVSWNSGALTSGVHTFPAVLQSSGLYSLSSVVTVPSSSLGTQTYICNVNHKPSNTKVDKKVEPKSCGGGGSGGGGSQVQLVQSGAEVKKPGSSVKVSCKASGYTFTDQTIHWMRQAPGQCLEWIGYIYPRDDSPKYNENFKGKVTITADKSTSTAYMELSSLRSEDTAVYYCAIPDRSGYAWFIYWGQGTLVTVSSGGGGSGGGGSGGGGSGGGGSDIQMTQSPSSLSASVGDRVTITCKASRDVAIAVAWYQQKPGKVPKLLIYWASTRHTGVPSRFSGSGSRTDFTLTISSLQPEDVADYFCHQYSSYPFTFGCGTKLEIKGGGGSGGGGSKTHTCPPCPAPPVAGPSVFLFPPKPKDTLMISRTPEVTCVVVDVKHEDPEVKFNWYVDGVEVHNAKTKPREEQYNSTYRVVSVLTVLHQDWLNGKEYKCKVSNKALPAPIEKTISKAKGQPREPQVYTLPPSREEMTKNQVSLTCLVKGFYPSDIAVEWESNGQPENNYKTTPPVLDSDGSFFLYSKLTVDKSRWQQGNVFSCSVLHEALHSHYTQKSLSLSPGK

SEQ ID NO: 1175 - protein, 214 aa, synthetic construct; identical to SEQ ID NO: 278

SEQ ID NO: 1176 - protein, 453 aa, synthetic construct; identical to SEQ ID NO: 276

SEQ ID NO: 1177 - protein, 440 aa, synthetic construct
DIQMTQSPSSLSASVGDRVTITCKASRDVAIAVAWYQQKPGKVPKLLIYWASTRHTGVPSRFSGSGSRTDFTLTISSLQPEDVADYFCHQYSSYPFTFGSGTKLEIKRTVAAPSVFIFPPSDEQLKSGTASVVCLLNNFYPREAKVQWKVDNALQSGNSQESVTEQDSKDSTYSLSSTLTLSKADYEKHKVYACEVTHQGLSSPVTKSFNRGECDKTHTCPPCPAPPVAGPSVFLFPPKPKDTLMISRTPEVTCVVVDVKHEDPEVKFNWYVDGVEVHNAKTKPREEQYNSTYRVVSVLTVLHQDWLNGKEYKCKVSNKALPAPIEKTISKAKGQPREPQVYTLPPSREQMTKNQVKLTCLVKGFYPSDIAVEWESNGQPENNYKTTPPVLDSDGSFFLYSKLTVDKSRWQQGNVFSCSVLHEALHSHYTQKSLSLSPGK

SEQ ID NO: 1178 - protein, 214 aa, synthetic construct; identical to SEQ ID NO: 278

SEQ ID NO: 1179 - protein, 223 aa, synthetic construct
QVQLVQSGAEVKKPGSSVKVSCKASGYTFTDQTIHWMRQAPGQGLEWIGYIYPRDDSPKYNENFKGKVTITADKSTSTAYMELSSLRSEDTAVYYCAIPDRSGYAWFIYWGQGTLVTVSSASTKGPSVFPLAPSSKSTSGGTAALGCLVKDYFPEPVTVSWNSGALTSGVHTFPAVLQSSGLYSLSSVVTVPSSSLGTQTYICNVNHKPSNTKVDKKVEPKSC

SEQ ID NO: 1180 - protein, 453 aa, synthetic construct; identical to SEQ ID NO: 276

SEQ ID NO: 1181 - protein, 438 aa, synthetic construct
DIQMTQSPSSLSASVGDRVTITCKASRDVAIAVAWYQQKPGKVPKLLIYWASTRHTGVPSRFSGSGSRTDFTLTISSLQPEDVADYFCHQYSSYPFTFGSGTKLEIKSSASTKGPSVFPLAPSSKSTSGGTAALGCLVKDYFPEPVTVSWNSGALTSGVHTFPAVLQSSGLYSLSSVVTVPSSSLGTQTYICNVNHKPSNTKVDKKVEPKSCDKTHTCPPCPAPPVAGPSVFLFPPKPKDTLMISRTPEVTCVVVDVKHEDPEVKFNWYVDGVEVHNAKTKPREEQYNSTYRVVSVLTVLHQDWLNGKEYKCKVSNKALPAPIEKTISKAKGQPREPQVYTLPPSREQMTKNQVKLTCLVKGFYPSDIAVEWESNGQPENNYKTTPPVLDSDGSFFLYSKLTVDKSRWQQGNVFSCSVLHEALHSHYTQKSLSLSPGK

SEQ ID NO: 1182 - protein, 214 aa, synthetic construct; identical to SEQ ID NO: 278

SEQ ID NO: 1183 - protein, 227 aa, synthetic construct
QVQLVQSGAEVKKPGSSVKVSCKASGYTFTDQTIHWMRQAPGQGLEWIGYIYPRDDSPKYNENFKGKVTITADKSTSTAYMELSSLRSEDTAVYYCAIPDRSGYAWFIYWGQGTLVTVSSASVAAPSVFIFPPSDEQLKSGTASVVCLLNNFYPREAKVQWKVDNALQSGNSQESVTEQDSKDSTYSLSSTLTLSKADYEKHKVYACEVTHQGLSSPVTKSFNRGEC

SEQ ID NO: 1184 - protein, 453 aa, synthetic construct; identical to SEQ ID NO: 276

SEQ ID NO: 1185 - protein, 453 aa, synthetic construct
QVQLVQSGAEVKKPGSSVKVSCKASGYTFTDQTIHWMRQAPGQGLEWIGYIYPRDDSPKYNENFKGKVTITADKSTSTAYMELSSLRSEDTAVYYCAIPDRSGYAWFIYWGQGTLVTVSSASVAAPSVFIFPPSDEQLKSGTASVVCLLNNFYPREAKVQWKVDNALQSGNSQESVTEQDSKDSTYSLSSTLTLSKADYEKHKVYACEVTHQGLSSPVTKSFNRGECDKTHTCPPCPAPPVAGPSVFLFPPKPKDTLMISRTPEVTCVVVDVKHEDPEVKFNWYVDGVEVHNAKTKPREEQYNSTYRVVSVLTVLHQDWLNGKEYKCKVSNKALPAPIEKTISKAKGQPREPQVYTLPPSREQMTKNQVKLTCLVKGFYPSDIAVEWESNGQPENNYKTTPPVLDSDGSFFLYSKLTVDKSRWQQGNVFSCSVLHEALHSHYTQKSLSLSPGK

SEQ ID NO: 1186 - protein, 214 aa, synthetic construct; identical to SEQ ID NO: 278

SEQ ID NO: 1187 - protein, 212 aa, synthetic construct
DIQMTQSPSSLSASVGDRVTITCKASRDVAIAVAWYQQKPGKVPKLLIYWASTRHTGVPSRFSGSGSRTDFTLTISSLQPEDVADYFCHQYSSYPFTFGSGTKLEIKSSASTKGPSVFPLAPSSKSTSGGTAALGCLVKDYFPEPVTVSWNSGALTSGVHTFPAVLQSSGLYSLSSVVTVPSSSLGTQTYICNVNHKPSNTKVDKKVEPKSC

SEQ ID NO: 1188 - protein, 449 aa, synthetic construct; identical to SEQ ID NO: 189

SEQ ID NO: 1189 - protein, 440 aa, synthetic construct
DIQMTQSPSSVSASVGDRVTITCRASEDIYSGLAWYQQKPGKSPKLLIYGASSLQDGVPSRFSGSGSGTDYTLTISSLQPEDFATYFCQEGLKSPYTFGAGTKLEIKRTVAAPSVFIFPPSDEQLKSGTASVVCLLNNFYPREAKVQWKVDNALQSGNSQESVTEQDSKDSTYSLSSTLTLSKADYEKHKVYACEVTHQGLSSPVTKSFNRGECDKTHTCPPCPAPPVAGPSVFLFPPKPKDTLMISRTPEVTCVVVDVKHEDPEVKFNWYVDGVEVHNAKTKPREEQYNSTYRVVSVLTVLHQDWLNGKEYKCKVSNKALPAPIEKTISKAKGQPREPQVYTLPPSREQMTKNQVKLTCLVKGFYPSDIAVEWESNGQPENNYKTTPPVLDSDGSFFLYSKLTVDKSRWQQGNVFSCSVLHEALHSHYTQKSLSLSPGK

SEQ ID NO: 1190 - protein, 214 aa, synthetic construct; identical to SEQ ID NO: 178

SEQ ID NO: 1191 - protein, 227 aa, synthetic construct
QVQLVQSGAEVKKPGASVKVSCKVSGFSVTSYNVHWVRQAPGQGLEWMGVMWSGGNTDYNSKFQGRVTMTRDTSTNTVYMELSSLRSEDTAVYYCARAGRYYHDSNYYWDFPYWGQGTLVTVSSASTKGPSVFPLAPSSKSTSGGTAALGCLVKDYFPEPVTVSWNSGALTSGVHTFPAVLQSSGLYSLSSVVTVPSSSLGTQTYICNVNHKPSNTKVDKKVEPKSC

SEQ ID NO: 1192 - protein, 449 aa, synthetic construct; identical to SEQ ID NO: 189

SEQ ID NO: 1193 - protein, 438 aa, synthetic construct
DIQMTQSPSSVSASVGDRVTITCRASEDIYSGLAWYQQKPGKSPKLLIYGASSLQDGVPSRFSGSGSGTDYTLTISSLQPEDFATYFCQEGLKSPYTFGAGTKLEIKSSASTKGPSVFPLAPSSKSTSGGTAALGCLVKDYFPEPVTVSWNSGALTSGVHTFPAVLQSSGLYSLSSVVTVPSSSLGTQTYICNVNHKPSNTKVDKKVEPKSCDKTHTCPPCPAPPVAGPSVFLFPPKPKDTLMISRTPEVTCVVVDVKHEDPEVKFNWYVDGVEVHNAKTKPREEQYNSTYRVVSVLTVLHQDWLNGKEYKCKVSNKALPAPIEKTISKAKGQPREPQVYTLPPSREQMTKNQVKLTCLVKGFYPSDIAVEWESNGQPENNYKTTPPVLDSDGSFFLYSKLTVDKSRWQQGNVFSCSVLHEALHSHYTQKSLSLSPGK

SEQ ID NO: 1194 - protein, 214 aa, synthetic construct; identical to SEQ ID NO: 178

SEQ ID NO: 1195 - protein, 231 aa, synthetic construct
QVQLVQSGAEVKKPGASVKVSCKVSGFSVTSYNVHWVRQAPGQGLEWMGVMWSGGNTDYNSKFQGRVTMTRDTSTNTVYMELSSLRSEDTAVYYCARAGRYYHDSNYYWDFPYWGQGTLVTVSSASVAAPSVFIFPPSDEQLKSGTASVVCLLNNFYPREAKVQWKVDNALQSGNSQESVTEQDSKDSTYSLSSTLTLSKADYEKHKVYACEVTHQGLSSPVTKSFNRGEC

SEQ ID NO: 1196 - protein, 449 aa, synthetic construct; identical to SEQ ID NO: 189

SEQ ID NO: 1197 - protein, 457 aa, synthetic construct
QVQLVQSGAEVKKPGASVKVSCKVSGFSVTSYNVHWVRQAPGQGLEWMGVMWSGGNTDYNSKFQGRVTMTRDTSTNTVYMELSSLRSEDTAVYYCARAGRYYHDSNYYWDFPYWGQGTLVTVSSASVAAPSVFIFPPSDEQLKSGTASVVCLLNNFYPREAKVQWKVDNALQSGNSQESVTEQDSKDSTYSLSSTLTLSKADYEKHKVYACEVTHQGLSSPVTKSFNRGECDKTHTCPPCPAPPVAGPSVFLFPPKPKDTLMISRTPEVTCVVVDVKHEDPEVKFNWYVDGVEVHNAKTKPREEQYNSTYRVVSVLTVLHQDWLNGKEYKCKVSNKALPAPIEKTISKAKGQPREPQVYTLPPSREQMTKNQVKLTCLVKGFYPSDIAVEWESNGQPENNYKTTPPVLDSDGSFFLYSKLTVDKSRWQQGNVFSCSVLHEALHSHYTQKSLSLSPGK

SEQ ID NO: 1198 - protein, 214 aa, synthetic construct; identical to SEQ ID NO: 178

SEQ ID NO: 1199 - protein, 212 aa, synthetic construct
DIQMTQSPSSVSASVGDRVTITCRASEDIYSGLAWYQQKPGKSPKLLIYGASSLQDGVPSRFSGSGSGTDYTLTISSLQPEDFATYFCQEGLKSPYTFGAGTKLEIKSSASTKGPSVFPLAPSSKSTSGGTAALGCLVKDYFPEPVTVSWNSGALTSGVHTFPAVLQSSGLYSLSSVVTVPSSSLGTQTYICNVNHKPSNTKVDKKVEPKSC

SEQ ID NO: 1200 - protein, 124 aa, synthetic construct
QVQLVQSGAEVKKPGASVKVSCKVSGFSVTRYNVHWVRQAPGQGLEWMGVMWSGANTDYNSKFQGRVTMTRDTSTNTVYMELSSLRSEDTAVYYCARAGRYYVDSNYYWDFPYWGQGTLVTVSS

SEQ ID NO: 1201 - protein, 5 aa, synthetic construct
RYNVH

SEQ ID NO: 1202 - protein, 16 aa, synthetic construct
VMWSGANTDYNSKFQG

SEQ ID NO: 1203 - protein, 16 aa, synthetic construct
AGRYYVDSNYYWDFPY

SEQ ID NO: 1204 - protein, 107 aa, synthetic construct
DIQMTQSPSSVSASVGDRVTITCRASEDIYSGLAWYQQKPGKSPKLLIYGASSLQDGVPSRFSGSGSGTDYTLTISSLQPEDFATYFCQEGLKSPYTFGQGTKLEIK

SEQ ID NO: 1205 - protein, 11 aa, synthetic construct
RASEDIYSGLA

SEQ ID NO: 1206 - protein, 7 aa, synthetic construct
GASSLQD

SEQ ID NO: 1207 - protein, 9 aa, synthetic construct
QEGLKSPYT

SEQ ID NO: 1208 - protein, 124 aa, synthetic construct
QVQLVQSGAEVKKPGASVKVSCKASGYDFTYYGISWVRQAPGQGLEWMGWISTYNGNTHYARMLQGRVTMTTDTSTRTAYMELRSLRSDDTAVYYCARENYYGSGAYRGGMDVWGQGTTVTVSS

SEQ ID NO: 1209 - protein, 5 aa, synthetic construct
YYGIS

SEQ ID NO: 1210 - protein, 17 aa, synthetic construct
WISTYNGNTHYARMLQG

SEQ ID NO: 1211 - protein, 15 aa, synthetic construct
ENYYGSGAYRGGMDV

SEQ ID NO: 1212 - protein, 107 aa, synthetic construct
EIVLTQSPATLSLSPGERATLSCRASQSVSSYLAWYQQKPGQAPRLLIYDASNRATGIPARFSGSGSGTDFTLTISSLEPEDFAVYYCQQRSNWPWTFGQGTKVEIK

SEQ ID NO: 1213 - protein, 11 aa, synthetic construct
RASQSVSSYLA

SEQ ID NO: 1214 - protein, 7 aa, synthetic construct
DASNRAT

SEQ ID NO: 1215 - protein, 9 aa, synthetic construct
QQRSNWPWT

SEQ ID NO: 1216 - protein, 116 aa, synthetic construct
QVQLVQSGAEVKKPGASVKVSCKASGFDIQDTYMHWVKQRPGQGLEWMGRIDPASGHTKYDPKFQVRVTITRDTSTSTVYLELSSLRSEDTAVYYCARSGGLPDVWGQGTTVTVSS

SEQ ID NO: 1217 - protein, 5 aa, synthetic construct
DTYMH

SEQ ID NO: 1218 - protein, 17 aa, synthetic construct
RIDPASGHTKYDPKFQV

SEQ ID NO: 1219 - protein, 7 aa, synthetic construct
SGGLPDV

SEQ ID NO: 1220 - protein, 106 aa, synthetic construct
EIVLTQSPGTLSLSPGERATLSCRASSSVSYMYWYQQKPGQAPRPLIYATSNLASGIPDRFSGSGSGTDFTLTISRLEPEDFAVYYCQQWEGNPRTFGGGTKLEIK

SEQ ID NO: 1221 - protein, 10 aa, synthetic construct
RASSSVSYMY

SEQ ID NO: 1222 - protein, 7 aa, synthetic construct
ATSNLAS

SEQ ID NO: 1223 - protein, 9 aa, synthetic construct
QQWEGNPRT

SEQ ID NO: 1224 - protein, 119 aa, synthetic construct
QVQLVQSGAEVKKPGASVKVSCKASGYTFTSYDINWVRQAPGQGLEWMGWLNPNSGYTGYAQKFQGRVTMTADRSTSTAYMELSSLRSEDTAVYYCAREVPETAAFEYWGQGTLVTVSS

SEQ ID NO: 1225 - protein, 5 aa, synthetic construct
SYDIN

SEQ ID NO: 1226 - protein, 17 aa, synthetic construct
WLNPNSGYTGYAQKFQG

SEQ ID NO: 1227 - protein, 10 aa, synthetic construct
EVPETAAFEY

SEQ ID NO: 1228 - protein, 110 aa, synthetic construct
QSVLTQPPSVSGAPGQRVTISCTSSSSDIGAGLGVHWYQQLPGTAPKLLIEGYYNRPSGVPDRFSGSKSGTSASLTITGLLPEDEGDYYCQSWDGTLSALFGGGTKLTVL

SEQ ID NO: 1229 - protein, 14 aa, synthetic construct
TSSSSDIGAGLGVH

SEQ ID NO: 1230 - protein, 7 aa, synthetic construct
GYYNRPS

SEQ ID NO: 1231 - protein, 10 aa, synthetic construct
QSWDGTLSAL

SEQ ID NO: 1232 - protein, 119 aa, synthetic construct
EVQLVESGGGLVKPGGSLRLSCAASGFTFSNAWMTWVRQAPGKGLEWVGRIKSKIDAGTTDYAAPVKGRFTISRDDSKNTLYLQMNSLKTEDTAVYYCTTDLGWGENYWGQGTLVTVSS

SEQ ID NO: 1233 - protein, 5 aa, synthetic construct
NAWMT

SEQ ID NO: 1234 - protein, 19 aa, synthetic construct
RIKSKIDAGTTDYAAPVKG

SEQ ID NO: 1235 - protein, 8 aa, synthetic construct
DLGWGENY

SEQ ID NO: 1236 - protein, 108 aa, synthetic construct
ENVLTQSPGTLSLSPGERATLSCRASQRVSSSYLVWYQQKPGQAPRLLIYGASSRATGIPDRFSGSGSGTDFTLTISRLEPEDFAVYYCQQYGSSPYTFGQGTKLEIK

SEQ ID NO: 1237 - protein, 12 aa, synthetic construct
RASQRVSSSYLV

SEQ ID NO: 1238 - protein, 7 aa, synthetic construct
GASSRAT

SEQ ID NO: 1239 - protein, 9 aa, synthetic construct
QQYGSSPYT

SEQ ID NO: 1240 - protein, 118 aa, synthetic construct
EVQLVQSGAEVKKPGASVKVSCKASGYTFTGYYMHWVRQAPGQGLEWMGWINPKSGGTNYAQKFQGRVTMTRDTSISTAYMELSRLISDDTAVYYCATGGSFDAFDVWGQGTMVTVSS

SEQ ID NO: 1241 - protein, 5 aa, synthetic construct
GYYMH

SEQ ID NO: 1242 - protein, 17 aa, synthetic construct
WINPKSGGTNYAQKFQG

SEQ ID NO: 1243 - protein, 9 aa, synthetic construct
GGSFDAFDV

SEQ ID NO: 1244 - protein, 107 aa, synthetic construct
DIVMTQSPSSLSASVGDRVTITCRASQSISSYLNWYQQSPGKAPKILIYGASRLQSGVPSRFSGSGSGTDFTLAISSLQPEDFATYYCQQGDNTPFTFGPGTKLEIK

SEQ ID NO: 1245 - protein, 11 aa, synthetic construct
RASQSISSYLN

SEQ ID NO: 1246 - protein, 7 aa, synthetic construct
GASRLQS

SEQ ID NO: 1247 - protein, 9 aa, synthetic construct
QQGDNTPFT

SEQ ID NO: 1248 - protein, 107 aa, synthetic construct
DIQMTQSPSSLSASVGDRVTITCKASRDVAIAVAWYQQKPGKVPKLLIYWASVRHTGVPSRFSGSGSRTDFTLTISSLQPEDVADYFCYQYSSYPFTFGSGTKLEIK

SEQ ID NO: 1249 - protein, 7 aa, synthetic construct
WASVRHT

SEQ ID NO: 1250 - protein, 9 aa, synthetic construct
YQYSSYPFT

SEQ ID NO: 1251 - protein, 117 aa, synthetic construct
EVQLVQSGAEVKKPGESLKISCKGSGYSFSNYWIGWVRQMPGKGLEWMGIIDPSNSYTRYSPSFQGQVTISADKSISTAYLQWSSLKASDTAMYYCARWYYKPFDVWGQGTLVTVSS

SEQ ID NO: 1252 - protein, 5 aa, synthetic construct
NYWIG

SEQ ID NO: 1253 - protein, 17 aa, synthetic construct
IIDPSNSYTRYSPSFQG

SEQ ID NO: 1254 - protein, 8 aa, synthetic construct
WYYKPFDV

SEQ ID NO: 1255 - protein, 111 aa, synthetic construct
QSVLTQPPSVSGAPGQRVTISCTGSSSNIGSGYDVHWYQQLPGTAPKLLIYGNSKRPSGVPDRFSGSKSGTSASLAITGLQSEDEADYYCASWTDGLSLVVFGGGTKLTVL

SEQ ID NO: 1256 - protein, 14 aa, synthetic construct
TGSSSNIGSGYDVH

SEQ ID NO: 1257 - protein, 7 aa, synthetic construct
GNSKRPS

SEQ ID NO: 1258 - protein, 11 aa, synthetic construct
ASWTDGLSLVV

SEQ ID NO: 1259 - protein, 116 aa, synthetic construct [sequence omitted]

SEQ ID NO: 1260 - protein, 5 aa, synthetic construct
TYWMT

SEQ ID NO: 1261 - protein, 17 aa, synthetic construct
QIFPASGSADYNEKFEG

SEQ ID NO: 1262 - protein, 7 aa, synthetic construct
GGGGFAY

SEQ ID NO: 1263 - protein, 107 aa, synthetic construct [sequence omitted]

SEQ ID NO: 1264 - protein, 11 aa, synthetic construct
RTSENIYSYLA

SEQ ID NO: 1265 - protein, 7 aa, synthetic construct
NAKTLAE

SEQ ID NO: 1266 - protein, 9 aa, synthetic construct
QHHYGIPFT

SEQ ID NO: 1267 - protein, 115 aa, synthetic construct
QVQLVQSGAEVKKPGSSVKVSCKASGYKFTRYVMHWVRQAPGQGLEWMGYINPYNDGTNYNEKFKGRVTITADKSTSTAYMELSSLRSEDTAVYYCARNWDTGLWGQGTTVTVSS

SEQ ID NO: 1268 - protein, 5 aa, synthetic construct
RYVMH

SEQ ID NO: 1269 - protein, 17 aa, synthetic construct
YINPYNDGTNYNEKFKG

SEQ ID NO: 1270 - protein, 6 aa, synthetic construct
NWDTGL

SEQ ID NO: 1271 - protein, 107 aa, synthetic construct
DIQMTQSPSSLSASVGDRVTITCKASDHILKFLTWYQQKPGKAPKLLIYGATSLETGVPSRFSGSGSGTDFTLTISSLQPEDFATYYCQMYWSTPFTFGGGTKVEIK

SEQ ID NO: 1272 - protein, 11 aa, synthetic construct
KASDHILKFLT

SEQ ID NO: 1273 - protein, 7 aa, synthetic construct
GATSLET

SEQ ID NO: 1274 - protein, 9 aa, synthetic construct
QMYWSTPFT

SEQ ID NO: 1275 - protein, 124 aa, synthetic construct
QVQLVESGGGVVQPGRSLRLSCAASGFTFSSYGMHWVRQAPGKGLEWVAVIWYDGSNEYYADSVKGRFTISRDNSKNTLYLQMNSLRAEDTAVYYCARDRGYTSSWYPDAFDIWGQGTMVTVSS

SEQ ID NO: 1276 - protein, 5 aa, synthetic construct
SYGMH

SEQ ID NO: 1277 - protein, 17 aa, synthetic construct
VIWYDGSNEYYADSVKG

SEQ ID NO: 1278 - protein, 15 aa, synthetic construct
DRGYTSSWYPDAFDI

SEQ ID NO: 1279 - protein, 111 aa, synthetic construct
QSVLTQPPSVSGAPGQRVTISCTGSSSNTGAGYDVHWYQQVPGTAPKLLIYGSGNRPSGVPDRFSGSKSGTSASLAITGLQAEDEADYYCQSYDSSLSGWVFGGGTRLTVL

SEQ ID NO: 1280 - protein, 14 aa, synthetic construct
TGSSSNTGAGYDVH

SEQ ID NO: 1281 - protein, 7 aa, synthetic construct
GSGNRPS

SEQ ID NO: 1282 - protein, 11 aa, synthetic construct
QSYDSSLSGWV

SEQ ID NO: 1283 - protein, 123 aa, synthetic construct
EVQLLESGGGLVQPGGSLRLSCAASGFTFSAYGMDWVRQAPGKGLEWVSSISPSGGRTKYADSVKGRFTISRDNSKNTLYLQMNSLRAEDTAVYYCAKDLGGGYYYYYGMDVWGQGTLVTVSS

SEQ ID NO: 1284 - protein, 5 aa, synthetic construct
AYGMD

SEQ ID NO: 1285 - protein, 17 aa, synthetic construct
SISPSGGRTKYADSVKG

SEQ ID NO: 1286 - protein, 14 aa, synthetic construct
DLGGGYYYYYGMDV

SEQ ID NO: 1287 - protein, 112 aa, synthetic construct
QYELTQPASVSGSPGQSITISCTGTSSDVGGYNYVSWYQQHPGKAPKLMIYEVSNRPSGVSNRFSGSKSGNTASLTISGLQAEDEADYYCSSYTSSSTLFYVFGTGTKVTVL

SEQ ID NO: 1288 - protein, 14 aa, synthetic construct
TGTSSDVGGYNYVS

SEQ ID NO: 1289 - protein, 7 aa, synthetic construct
EVSNRPS

SEQ ID NO: 1290 - protein, 12 aa, synthetic construct
SSYTSSSTLFYV

SEQ ID NO: 1291 - protein, 453 aa, synthetic construct
QVQLVQSGAEVKKPGASVKVSCKVSGFSVTSYNVHWVRQAPGQGLEWMGVMWSGGNTDYNSKFQGRVTMTRDTSTNTVYMELSSLRSEDTAVYYCARAGRYYHDSNYYWDFPYWGQGTLVTVSSASTKGPSVFPLAPSSKSTSGGTAALGCLVEDYFPEPVTVSWNSGALTSGVHTFPAVLQSSGLYSLSSVVTVPSSSLGTQTYICNVNHKPSDTKVDEKVEPKSCDKTHTCPPCPAPPVAGPSVFLFPPKPKDTLMISRTPEVTCVVVDVKHEDPEVKFNWYVDGVEVHNAKTKPREEEYNSTYRVVSVLTVLHQDWLNGKEYKCKVSNKALPAPIEKTISKAKGQPREPQVYTLPPSREEMTKNQVSLTCDVSGFYPSDIAVEWESDGQPENNYKTTPPVLDSDGSFFLYSKLTVDKSRWEQGDVFSCSVLHEALHSHYTQKSLSLSPGK

SEQ ID NO: 1292 - protein, 438 aa, synthetic construct; identical to SEQ ID NO: 1181

SEQ ID NO: 1293 - protein, 214 aa, synthetic construct
DIQMTQSPSSVSASVGDRVTITCRASEDIYSGLAWYQQKPGKSPKLLIYGASSLQDGVPSRFSGSGSGTDYTLTISSLQPEDFATYFCQEGLKSPYTFGAGTKLEIKRTVAAPSVFIFPPSDRKLKSGTASVVCLLNNFYPREAKVQWKVDNALQSGNSQESVTEQDSKDSTYSLSSTLTLSKADYEKHKVYACEVTHQGLSSPVTKSFNRGEC

SEQ ID NO: 1294 - protein, 227 aa, synthetic construct; identical to SEQ ID NO: 1183

SEQ ID NO: 1295 - protein, 453 aa, synthetic construct
QVQLVQSGAEVKKPGASVKVSCKVSGFSVTSYNVHWVRQAPGQGLEWMGVMWSGGNTDYNSKFQGRVTMTRDTSTNTVYMELSSLRSEDTAVYYCARAGRYYHDSNYYWDFPYWGQGTLVTVSSASTKGPSVFPLAPSSKSTSGGTAALGCLVKDYFPEPVTVSWNSGALTSGVHTFPAVLQSSGLYSLSSVVTVPSSSLGTQTYICNVNHKPSDTKVDEKVEPDSCDKTHTCPPCPAPPVAGPSVFLFPPKPKDTLMISRTPEVTCVVVDVKHEDPEVKFNWYVDGVEVHNAKTKPREEEYNSTYRVVSVLTVLHQDWLNGKEYKCKVSNKALPAPIEKTISKAKGQPREPQVYTLPPSREEMTKNQVSLTCDVSGFYPSDIAVEWESDGQPENNYKTTPPVLDSDGSFFLYSKLTVDKSRWEQGDVFSCSVLHEALHSHYTQKSLSLSPGK

SEQ ID NO: 1296 - protein, 438 aa, synthetic construct; identical to SEQ ID NO: 1181

SEQ ID NO: 1297 - protein, 214 aa, synthetic construct
DIQMTQSPSSVSASVGDRVTITCRASEDIYSGLAWYQQKPGKSPKLLIYGASSLQDGVPSRFSGSGSGTDYTLTISSLQPEDFATYFCQEGLKSPYTFGAGTKLEIKRTVAAPSVFIFPPSKKQLKSGTASVVCLLNNFYPREAKVQWKVDNALQSGNSQESVTEQDSKDSTYSLSSTLTLSKADYEKHKVYACEVTHQGLSSPVTKSFNRGEC

SEQ ID NO: 1298 - protein, 227 aa, synthetic construct; identical to SEQ ID NO: 1183

SEQ ID NO: 1299 - protein, 453 aa, synthetic construct; identical to SEQ ID NO: 1056

SEQ ID NO: 1300 - protein, 438 aa, synthetic construct
DIQMTQSPSSLSASVGDRVTITCKASRDVAIAVAWYQKKPGKVPKLLIYWASTRHTGVPSRFSGSGSRTDFTLTISSLQPEDVADYFCHQYSSYPFTFGSGTKLEIKSSASTKGPSVFPLAPSSKSTSGGTAALGCLVKDYFPEPVTVSWNSGALTSGVHTFPAVLQSSGLYSLSSVVTVPSSSLGTQTYICNVNHKPSNTKVDKKVEPKSCDKTHTCPPCPAPPVAGPSVFLFPPKPKDTLMISRTPEVTCVVVDVKHEDPEVKFNWYVDGVEVHNAKTKPREEQYNSTYRVVSVLTVLHQDWLNGKEYKCKVSNKALPAPIEKTISKAKGQPREPQVYTLPPSREQMTKNQVKLTCLVKGFYPSDIAVEWESNGQPENNYKTTPPVLDSDGSFFLYSKLTVDKSRWQQGNVFSCSVLHEALHSHYTQKSLSLSPGK

SEQ ID NO: 1301 - protein, 214 aa, synthetic construct; identical to SEQ ID NO: 1046

SEQ ID NO: 1302 - protein, 227 aa, synthetic construct
QVQLVQSGAEVKKPGSSVKVSCKASGYTFTDQTIHWMREAPGQGLEWIGYIYPRDDSPKYNENFKGKVTITADKSTSTAYMELSSLRSEDTAVYYCAIPDRSGYAWFIYWGQGTLVTVSSASVAAPSVFIFPPSDEQLKSGTASVVCLLNNFYPREAKVQWKVDNALQSGNSQESVTEQDSKDSTYSLSSTLTLSKADYEKHKVYACEVTHQGLSSPVTKSFNRGEC

SEQ ID NO: 1303 - protein, 449 aa, synthetic construct
QVQLVQSGAEVKKPGSSVKVSCKASGYTFTDQTIHWMRQAPGQGLEWIGYIYPRDDSPKYNENFKGKVTITADKSTSTAYMELSSLRSEDTAVYYCAIPDRSGYAWFIYWGQGTLVTVSSASTKGPSVFPLAPSSKSTSGGTAALGCLVKDYFPEPVTVSWNSGALTSGVHTFPAVLQSSGLYSLSSVVTVPSSSLGTQTYICNVNHKPSDTKVDEKVEPDSCDKTHTCPPCPAPPVAGPSVFLFPPKPKDTLMISRTPEVTCVVVDVKHEDPEVKFNWYVDGVEVHNAKTKPREEEYNSTYRVVSVLTVLHQDWLNGKEYKCKVSNKALPAPIEKTISKAKGQPREPQVYTLPPSREEMTKNQVSLTCDVSGFYPSDIAVEWESDGQPENNYKTTPPVLDSDGSFFLYSKLTVDKSRWEQGDVFSCSVLHEALHSHYTQKSLSLSPGK

SEQ ID NO: 1304 - protein, 438 aa, synthetic construct; identical to SEQ ID NO: 1193

SEQ ID NO: 1305 - protein, 214 aa, synthetic construct
DIQMTQSPSSLSASVGDRVTITCKASRDVAIAVAWYQQKPGKVPKLLIYWASTRHTGVPSRFSGSGSRTDFTLTISSLQPEDVADYFCHQYSSYPFTFGSGTKLEIKRTVAAPSVFIFPPSKKQLKSGTASVVCLLNNFYPREAKVQWKVDNALQSGNSQESVTEQDSKDSTYSLSSTLTLSKADYEKHKVYACEVTHQGLSSPVTKSFNRGEC

SEQ ID NO: 1306 - protein, 231 aa, synthetic construct; identical to SEQ ID NO: 1195

SEQ ID NO: 1307 - protein, 438 aa, synthetic construct
DIQMTQSPSSVSASVGDRVTITCRASEDIYSGLAWYQQKPGKSPKLLIYGASSLQDGVPSRFSGSGSGTDYTLTISSLQPEDFATYFCQEGLKSPYTFGAGTKLEIKSSASTKGPSVFPLAPSSKSTSGGTAALGCLVKDYFPEPVTVSWNSGALTSGVHTFPAVLQSSGLYSLSSVVTVPSSSLGTQTYICNVNHKPSDTKVDKKVEPKSCDKTHTCPPCPAPPVAGPSVFLFPPKPKDTLMISRTPEVTCVVVDVKHEDPEVKFNWYVDGVEVHNAKTKPREEEYNSTYRVVSVLTVLHQDWLNGKEYKCKVSNKALPAPIEKTISKAKGQPREPQVYTLPPSREEMTKNQVSLTCDVSGFYPSDIAVEWESDGQPENNYKTTPPVLDSDGSFFLYSKLTVDKSRWEQGDVFSCSVLHEALHSHYTQKSLSLSPGK

SEQ ID NO: 1308 - protein, 449 aa, synthetic construct
QVQLVQSGAEVKKPGSSVKVSCKASGYTFTDQTIHWMRQAPGQGLEWIGYIYPRDDSPKYNENFKGKVTITADKSTSTAYMELSSLRSEDTAVYYCAIPDRSGYAWFIYWGQGTLVTVSSASTKGPSVFPLAPSSKSTSGGTAALGCLVKDYFPEPVTVSWNSGALTSGVHTFPAVLQSSGLYSLSSVVTVPSSSLGTQTYICNVNHKPSNTKVDEKVEPDSCDKTHTCPPCPAPPVAGPSVFLFPPKPKDTLMISRTPEVTCVVVDVKHEDPEVKFNWYVDGVEVHNAKTKPREEQYNSTYRVVSVLTVLHQDWLNGKEYKCKVSNKALPAPIEKTISKAKGQPREPQVYTLPPSREQMTKNQVKLTCLVKGFYPSDIAVEWESNGQPENNYKTTPPVLDSDGSFFLYSKLTVDKSRWQQGNVFSCSVLHEALHSHYTQKSLSLSPGK

SEQ ID NO: 1309 - protein, 231 aa, synthetic construct; identical to SEQ ID NO: 1195

SEQ ID NO: 1310 - protein, 214 aa, synthetic construct; identical to SEQ ID NO: 1305

SEQ ID NO: 1311 - protein, 438 aa, synthetic construct
DIQMTQSPSSVSASVGDRVTITCRASEDIYSGLAWYQKKPGKSPKLLIYGASSLQDGVPSRFSGSGSGTDYTLTISSLQPEDFATYFCQEGLKSPYTFGAGTKLEIKSSASTKGPSVFPLAPSSKSTSGGTAALGCLVKDYFPEPVTVSWNSGALTSGVHTFPAVLQSSGLYSLSSVVTVPSSSLGTQTYICNVNHKPSDTKVDKKVEPKSCDKTHTCPPCPAPPVAGPSVFLFPPKPKDTLMISRTPEVTCVVVDVKHEDPEVKFNWYVDGVEVHNAKTKPREEEYNSTYRVVSVLTVLHQDWLNGKEYKCKVSNKALPAPIEKTISKAKGQPREPQVYTLPPSREEMTKNQVSLTCDVSGFYPSDIAVEWESDGQPENNYKTTPPVLDSDGSFFLYSKLTVDKSRWEQGDVFSCSVLHEALHSHYTQKSLSLSPGK

SEQ ID NO: 1312 - protein, 449 aa, synthetic construct
QVQLVQSGAEVKKPGSSVKVSCKASGYTFTDQTIHWMREAPGQGLEWIGYIYPRDDSPKYNENFKGKVTITADKSTSTAYMELSSLRSEDTAVYYCAIPDRSGYAWFIYWGQGTLVTVSSASTKGPSVFPLAPSSKSTSGGTAALGCLVKDYFPEPVTVSWNSGALTSGVHTFPAVLQSSGLYSLSSVVTVPSSSLGTQTYICNVNHKPSNTKVDEKVEPDSCDKTHTCPPCPAPPVAGPSVFLFPPKPKDTLMISRTPEVTCVVVDVKHEDPEVKFNWYVDGVEVHNAKTKPREEQYNSTYRVVSVLTVLHQDWLNGKEYKCKVSNKALPAPIEKTISKAKGQPREPQVYTLPPSREQMTKNQVKLTCLVKGFYPSDIAVEWESNGQPENNYKTTPPVLDSDGSFFLYSKLTVDKSRWQQGNVFSCSVLHEALHSHYTQKSLSLSPGK

SEQ ID NO: 1313 - protein, 231 aa, synthetic construct
QVQLVQSGAEVKKPGASVKVSCKVSGFSVTSYNVHWVREAPGQGLEWMGVMWSGGNTDYNSKFQGRVTMTRDTSTNTVYMELSSLRSEDTAVYYCARAGRYYHDSNYYWDFPYWGQGTLVTVSSASVAAPSVFIFPPSDEQLKSGTASVVCLLNNFYPREAKVQWKVDNALQSGNSQESVTEQDSKDSTYSLSSTLTLSKADYEKHKVYACEVTHQGLSSPVTKSFNRGEC

SEQ ID NO: 1314 - protein, 214 aa, synthetic construct; identical to SEQ ID NO: 1022

SEQ ID NO: 1315 - protein, 453 aa, synthetic construct
QVQLVQSGAEVKKPGASVKVSCKVSGFSVTSYNVHWVRQAPGQGLEWMGVMWSGGNTDYNSKFQGRVTMTRDTSTNTVYMELSSLRSEDTAVYYCARAGRYYHDSNYYWDFPYWGQGTLVTVSSASTKGPSVFPLAPSSKSTSGGTAALGCLVKDYFPEPVTVSWNSGALTSGVHTFPAVLQSSGLYSLSSVVTVPSSSLGTQTYICNVNHKPSDTKVDEKVEPDSCDKTHTCPPCPAPPVAGPSVFLFPPKPKDTLMISRTPEVTCVVVDVKHEDPEVKFNWYVDGVEVHNAKTKPREEEYNSTYRVVSVLTVLHQDWLNGKEYKCKVSNKALPAPIEKTISKAKGQPREPQVYTLPPSREEMTKNQVSLTCDVSGFYPSDIAVEWESDGQPENNYKTTPPVLDSDGSFFLYSKLTVDKSRWEQGDVFSCSVMHEALHNHYTQKSLSLSPGK

SEQ ID NO: 1316 - protein, 438 aa, synthetic construct
DIQMTQSPSSLSASVGDRVTITCKASRDVAIAVAWYQQKPGKVPKLLIYWASTRHTGVPSRFSGSGSRTDFTLTISSLQPEDVADYFCHQYSSYPFTFGSGTKLEIKSSASTKGPSVFPLAPSSKSTSGGTAALGCLVKDYFPEPVTVSWNSGALTSGVHTFPAVLQSSGLYSLSSVVTVPSSSLGTQTYICNVNHKPSNTKVDKKVEPKSCDKTHTCPPCPAPPVAGPSVFLFPPKPKDTLMISRTPEVTCVVVDVKHEDPEVKFNWYVDGVEVHNAKTKPREEQYNSTYRVVSVLTVLHQDWLNGKEYKCKVSNKALPAPIEKTISKAKGQPREPQVYTLPPSREQMTKNQVKLTCLVKGFYPSDIAVEWESNGQPENNYKTTPPVLDSDGSFFLYSKLTVDKSRWQQGNVFSCSVMHEALHNHYTQKSLSLSPGK

SEQ ID NO: 1317 - protein, 214 aa, synthetic construct; identical to SEQ ID NO: 1297

SEQ ID NO: 1318 - protein, 227 aa, synthetic construct; identical to SEQ ID NO: 1183

SEQ ID NO: 1319 - protein, 453 aa, synthetic construct
QVQLVQSGAEVKKPGASVKVSCKVSGFSVTSYNVHWVRQAPGQGLEWMGVMWSGGNTDYNSKFQGRVTMTRDTSTNTVYMELSSLRSEDTAVYYCARAGRYYHDSNYYWDFPYWGQGTLVTVSSASTKGPSVFPLAPSSKSTSGGTAALGCLVKDYFPEPVTVSWNSGALTSGVHTFPAVLQSSGLYSLSSVVTVPSSSLGTQTYICNVNHKPSDTKVDEKVEPDSCDKTHTCPPCPAPPVAGPSVFLFPPKPKDTLYITREPEVTCVVVDVKHEDPEVKFNWYVDGVEVHNAKTKPREEEYNSTYRVVSVLTVLHQDWLNGKEYKCKVSNKALPAPIEKTISKAKGQPREPQVYTLPPSREEMTKNQVSLTCDVSGFYPSDIAVEWESDGQPENNYKTTPPVLDSDGSFFLYSKLTVDKSRWEQGDVFSCSVMHEALHNHYTQKSLSLSPGK

SEQ ID NO: 1320 - protein, 438 aa, synthetic construct
DIQMTQSPSSLSASVGDRVTITCKASRDVAIAVAWYQQKPGKVPKLLIYWASTRHTGVPSRFSGSGSRTDFTLTISSLQPEDVADYFCHQYSSYPFTFGSGTKLEIKSSASTKGPSVFPLAPSSKSTSGGTAALGCLVKDYFPEPVTVSWNSGALTSGVHTFPAVLQSSGLYSLSSVVTVPSSSLGTQTYICNVNHKPSNTKVDKKVEPKSCDKTHTCPPCPAPPVAGPSVFLFPPKPKDTLYITREPEVTCVVVDVKHEDPEVKFNWYVDGVEVHNAKTKPREEQYNSTYRVVSVLTVLHQDWLNGKEYKCKVSNKALPAPIEKTISKAKGQPREPQVYTLPPSREQMTKNQVKLTCLVKGFYPSDIAVEWESNGQPENNYKTTPPVLDSDGSFFLYSKLTVDKSRWQQGNVFSCSVMHEALHNHYTQKSLSLSPGK

SEQ ID NO: 1321 - protein, 214 aa, synthetic construct; identical to SEQ ID NO: 1297

SEQ ID NO: 1322 - protein, 227 aa, synthetic construct; identical to SEQ ID NO: 1183

SEQ ID NO: 1323 - protein, 438 aa, synthetic construct
DIQMTQSPSSVSASVGDRVTITCRASEDIYSGLAWYQQKPGKSPKLLIYGASSLQDGVPSRFSGSGSGTDYTLTISSLQPEDFATYFCQEGLKSPYTFGQGTKLEIKSSASTKGPSVFPLAPSSKSTSGGTAALGCLVKDYFPEPVTVSWNSGALTSGVHTFPAVLQSSGLYSLSSVVTVPSSSLGTQTYICNVNHKPSDTKVDKKVEPKSCDKTHTCPPCPAPPVAGPSVFLFPPKPKDTLMISRTPEVTCVVVDVKHEDPEVKFNWYVDGVEVHNAKTKPREEEYNSTYRVVSVLTVLHQDWLNGKEYKCKVSNKALPAPIEKTISKAKGQPREPQVYTLPPSREEMTKNQVSLTCDVSGFYPSDIAVEWESDGQPENNYKTTPPVLDSDGSFFLYSKLTVDKSRWEQGDVFSCSVLHEALHSHYTQKSLSLSPGK

SEQ ID NO: 1324 - protein, 449 aa, synthetic construct; identical to SEQ ID NO: 1308

SEQ ID NO: 1325 - protein, 231 aa, synthetic construct
QVQLVQSGAEVKKPGASVKVSCKVSGFPVTSYNVHWVRQAPGQGLEWMGVMWYGGNTDYNSKFQGRVTMTRDTSTNTVYMELSSLRSEDTAVYYCARAGRYYHDSNYYWDFPYWGQGTLVTVSSASVAAPSVFIFPPSDEQLKSGTASVVCLLNNFYPREAKVQWKVDNALQSGNSQESVTEQDSKDSTYSLSSTLTLSKADYEKHKVYACEVTHQGLSSPVTKSFNRGEC

SEQ ID NO: 1326 - protein, 214 aa, synthetic construct
DIQMTQSPSSLSASVGDRVTITCKASRDVAIAVAWYQQKPGKVPKLLIYWASVRHTGVPSRFSGSGSRTDFTLTISSLQPEDVADYFCYQYSSYPFTFGSGTKLEIKRTVAAPSVFIFPPSKKQLKSGTASVVCLLNNFYPREAKVQWKVDNALQSGNSQESVTEQDSKDSTYSLSSTLTLSKADYEKHKVYACEVTHQGLSSPVTKSFNRGEC

SEQ ID NO: 1327 - protein, 438 aa, synthetic construct; identical to SEQ ID NO: 1323

SEQ ID NO: 1328 - protein, 449 aa, synthetic construct
QVQLVQSGAEVKKPGSSVKVSCKASGYTFTDQTIHWMRQAPGQGLEWIGYIYPRDDSPKYNENFKGKVTITADKSTSTAYMELSSLRSEDTAVYYCAIPDRSGYAFFIYWGQGTLVTVSSASTKGPSVFPLAPSSKSTSGGTAALGCLVKDYFPEPVTVSWNSGALTSGVHTFPAVLQSSGLYSLSSVVTVPSSSLGTQTYICNVNHKPSNTKVDEKVEPDSCDKTHTCPPCPAPPVAGPSVFLFPPKPKDTLMISRTPEVTCVVVDVKHEDPEVKFNWYVDGVEVHNAKTKPREEQYNSTYRVVSVLTVLHQDWLNGKEYKCKVSNKALPAPIEKTISKAKGQPREPQVYTLPPSREQMTKNQVKLTCLVKGFYPSDIAVEWESNGQPENNYKTTPPVLDSDGSFFLYSKLTVDKSRWQQGNVFSCSVLHEALHSHYTQKSLSLSPGK

SEQ ID NO: 1329 - protein, 231 aa, synthetic construct; identical to SEQ ID NO: 1325

SEQ ID NO: 1330 - protein, 214 aa, synthetic construct
DIQMTQSPSSLSASVGDRVTITCKASRDVAIAVAWYQQKPGKVPKLLIYWASQRHTGVPSRFSGSGSRTDFTLTISSLQPEDVADYFCYQYSSYPFTFGSGTKLEIKRTVAAPSVFIFPPSKKQLKSGTASVVCLLNNFYPREAKVQWKVDNALQSGNSQESVTEQDSKDSTYSLSSTLTLSKADYEKHKVYACEVTHQGLSSPVTKSFNRGEC

SEQ ID NO: 1331 - protein, 438 aa, synthetic construct; identical to SEQ ID NO: 1323

SEQ ID NO: 1332 - protein, 449 aa, synthetic construct
QVQLVQSGAEVKKPGSSVKVSCKASGYTFTDQTLHWMRQAPGQGLEWIGYIYPRDDSPKYNENFKGKVTITADKSTSTAYMELSSLRSEDTAVYYCAIPDRSGYAWFIYWGQGTLVTVSSASTKGPSVFPLAPSSKSTSGGTAALGCLVKDYFPEPVTVSWNSGALTSGVHTFPAVLQSSGLYSLSSVVTVPSSSLGTQTYICNVNHKPSNTKVDEKVEPDSCDKTHTCPPCPAPPVAGPSVFLFPPKPKDTLMISRTPEVTCVVVDVKHEDPEVKFNWYVDGVEVHNAKTKPREEQYNSTYRVVSVLTVLHQDWLNGKEYKCKVSNKALPAPIEKTISKAKGQPREPQVYTLPPSREQMTKNQVKLTCLVKGFYPSDIAVEWESNGQPENNYKTTPPVLDSDGSFFLYSKLTVDKSRWQQGNVFSCSVLHEALHSHYTQKSLSLSPGK

SEQ ID NO: 1333 - protein, 231 aa, synthetic construct; identical to SEQ ID NO: 1325

SEQ ID NO: 1334 - protein, 214 aa, synthetic construct; identical to SEQ ID NO: 1326

SEQ ID NO: 1335 - protein, 438 aa, synthetic construct; identical to SEQ ID NO: 1323

SEQ ID NO: 1336 - protein, 449 aa, synthetic construct; identical to SEQ ID NO: 1308

SEQ ID NO: 1337 - protein, 231 aa, synthetic construct
QVQLVQSGAEVKKPGASVKVSCKVSGFSVTSYNVHWVRQAPGQGLEWMGVMWFGGNTDYNSKFQGRVTMTRDTSTNTVYMELSSLRSEDTAVYYCARAGRYYHDSNYYWDFPYWGQGTLVTVSSASVAAPSVFIFPPSDEQLKSGTASVVCLLNNFYPREAKVQWKVDNALQSGNSQESVTEQDSKDSTYSLSSTLTLSKADYEKHKVYACEVTHQGLSSPVTKSFNRGEC

SEQ ID NO: 1338 - protein, 214 aa, synthetic construct; identical to SEQ ID NO: 1326

SEQ ID NO: 1339 - protein, 438 aa, synthetic construct; identical to SEQ ID NO: 1323

SEQ ID NO: 1340 - protein, 449 aa, synthetic construct; identical to SEQ ID NO: 1328

SEQ ID NO: 1341 - protein, 231 aa, synthetic construct; identical to SEQ ID NO: 1337

SEQ ID NO: 1342 - protein, 214 aa, synthetic construct; identical to SEQ ID NO: 1330

SEQ ID NO: 1343 - protein, 438 aa, synthetic construct; identical to SEQ ID NO: 1323

SEQ ID NO: 1344 - protein, 449 aa, synthetic construct; identical to SEQ ID NO: 1332

SEQ ID NO: 1345 - protein, 231 aa, synthetic construct; identical to SEQ ID NO: 1337

SEQ ID NO: 1346 - protein, 214 aa, synthetic construct; identical to SEQ ID NO: 1326

SEQ ID NO: 1347 - protein, 438 aa, synthetic construct; identical to SEQ ID NO: 1323

SEQ ID NO: 1348 - protein, 449 aa, synthetic construct; identical to SEQ ID NO: 1308

SEQ ID NO: 1349 - protein, 231 aa, synthetic construct
QVQLVQSGAEVKKPGASVKVSCKVSGFSVTRYNVHWVRQAPGQGLEWMGVMWSGANTDYNSKFQGRVTMTRDTSTNTVYMELSSLRSEDTAVYYCARAGRYYVDSNYYWDFPYWGQGTLVTVSSASVAAPSVFIFPPSDEQLKSGTASVVCLLNNFYPREAKVQWKVDNALQSGNSQESVTEQDSKDSTYSLSSTLTLSKADYEKHKVYACEVTHQGLSSPVTKSFNRGEC

SEQ ID NO: 1350 - protein, 214 aa, synthetic construct; identical to SEQ ID NO: 1326

SEQ ID NO: 1351 - protein, 438 aa, synthetic construct; identical to SEQ ID NO: 1323

SEQ ID NO: 1352 - protein, 449 aa, synthetic construct; identical to SEQ ID NO: 1328

SEQ ID NO: 1353 - protein, 231 aa, synthetic construct; identical to SEQ ID NO: 1349

SEQ ID NO: 1354 - protein, 214 aa, synthetic construct; identical to SEQ ID NO: 1330

SEQ ID NO: 1355 - protein, 438 aa, synthetic construct; identical to SEQ ID NO: 1323

SEQ ID NO: 1356 - protein, 449 aa, synthetic construct; identical to SEQ ID NO: 1332

SEQ ID NO: 1357 - protein, 231 aa, synthetic construct; identical to SEQ ID NO: 1349

SEQ ID NO: 1358 - protein, 214 aa, synthetic construct; identical to SEQ ID NO: 1326

SEQ ID NO: 1359 - protein, 438 aa, synthetic construct; identical to SEQ ID NO: 1323

SEQ ID NO: 1360 - protein, 449 aa, synthetic construct; identical to SEQ ID NO: 1308

SEQ ID NO: 1361 - protein, 231 aa, synthetic construct
QVQLVQSGAEVKKPGASVKVSCKVSGFSVTSYNVHWVRQAPGQGLEWMGVMWRGGNTDYNSKFQGRVTMTRDTSTNTVYMELSSLRSEDTAVYYCARAGRYYHDSNYYWDFPYWGQGTLVTVSSASVAAPSVFIFPPSDEQLKSGTASVVCLLNNFYPREAKVQWKVDNALQSGNSQESVTEQDSKDSTYSLSSTLTLSKADYEKHKVYACEVTHQGLSSPVTKSFNRGEC

SEQ ID NO: 1362 - protein, 214 aa, synthetic construct; identical to SEQ ID NO: 1326

SEQ ID NO: 1363 - protein, 438 aa, synthetic construct; identical to SEQ ID NO: 1323

SEQ ID NO: 1364 - protein, 449 aa, synthetic construct; identical to SEQ ID NO: 1328

SEQ ID NO: 1365 - protein, 231 aa, synthetic construct; identical to SEQ ID NO: 1361

SEQ ID NO: 1366 - protein, 214 aa, synthetic construct; identical to SEQ ID NO: 1330

SEQ ID NO: 1367 - protein, 438 aa, synthetic construct; identical to SEQ ID NO: 1323

SEQ ID NO: 1368 - protein, 449 aa, synthetic construct; identical to SEQ ID NO: 1332

SEQ ID NO: 1369 - protein, 231 aa, synthetic construct; identical to SEQ ID NO: 1361

SEQ ID NO: 1370 - protein, 214 aa, synthetic construct; identical to SEQ ID NO: 1326

SEQ ID NO: 1371 - protein, 438 aa, synthetic construct; identical to SEQ ID NO: 1323

SEQ ID NO: 1372 - protein, 449 aa, synthetic construct; identical to SEQ ID NO: 1308

SEQ ID NO: 1373 - protein, 231 aa, synthetic construct
QVQLVQSGAEVKKPGASVKVSCKVSGFSVTSYNVHWVRQAPGQGLEWMGVMWYGGNTDYNSKFQGRVTMTRDTSTNTVYMELSSLRSEDTAVYYCARAGRYYVDSNYYWDFPYWGQGTLVTVSSASVAAPSVFIFPPSDEQLKSGTASVVCLLNNFYPREAKVQWKVDNALQSGNSQESVTEQDSKDSTYSLSSTLTLSKADYEKHKVYACEVTHQGLSSPVTKSFNRGEC

SEQ ID NO: 1374 - protein, 214 aa, synthetic construct; identical to SEQ ID NO: 1326

SEQ ID NO: 1375 - protein, 438 aa, synthetic construct; identical to SEQ ID NO: 1323

SEQ ID NO: 1376 - protein, 449 aa, synthetic construct; identical to SEQ ID NO: 1328

SEQ ID NO: 1377 - protein, 231 aa, synthetic construct; identical to SEQ ID NO: 1373

SEQ ID NO: 1378 - protein, 214 aa, synthetic construct; identical to SEQ ID NO: 1330

SEQ ID NO: 1379 - protein, 438 aa, synthetic construct; identical to SEQ ID NO: 1323

SEQ ID NO: 1380 - protein, 449 aa, synthetic construct; identical to SEQ ID NO: 1332

SEQ ID NO: 1381 - protein, 231 aa, synthetic construct; identical to SEQ ID NO: 1373

SEQ ID NO: 1382 - protein, 214 aa, synthetic construct; identical to SEQ ID NO: 1326

SEQ ID NO: 1383 - protein, 438 aa, synthetic construct
DIVMTQSPDSLAVSLGERATINCKASQDVSTAVVWYQQKPGQSPKLLIYWASTRHTGVPDRFTGSGSGTDYTLTISSLQAEDVAVYHCQQHYSTPYTFGGGTKLEIKSSASTKGPSVFPLAPSSKSTSGGTAALGCLVKDYFPEPVTVSWNSGALTSGVHTFPAVLQSSGLYSLSSVVTVPSSSLGTQTYICNVNHKPSDTKVDKKVEPKSCDKTHTCPPCPAPPVAGPSVFLFPPKPKDTLMISRTPEVTCVVVDVKHEDPEVKFNWYVDGVEVHNAKTKPREEEYNSTYRVVSVLTVLHQDWLNGKEYKCKVSNKALPAPIEKTISKAKGQPREPQVYTLPPSREEMTKNQVSLTCDVSGFYPSDIAVEWESDGQPENNYKTTPPVLDSDGSFFLYSKLTVDKSRWEQGDVFSCSVLHEALHSHYTQKSLSLSPGK

SEQ ID NO: 1384 - protein, 449 aa, synthetic construct; identical to SEQ ID NO: 1308

SEQ ID NO: 1385 - protein, 226 aa, synthetic construct
EVQLVESGGGLVQPGGSLRLSCAASGFTFSSFGMHWVRQAPGKGLEWVSYISSGSTTIYYADSVKGRFTISRDNAKNSLYLQMNSLRAEDTAVYYCARAPLLRGAMDYWGQGTLVTVSSASVAAPSVFIFPPSDEQLKSGTASVVCLLNNFYPREAKVQWKVDNALQSGNSQESVTEQDSKDSTYSLSSTLTLSKADYEKHKVYACEVTHQGLSSPVTKSFNRGEC

SEQ ID NO: 1386 - protein, 214 aa, synthetic construct; identical to SEQ ID NO: 1305

SEQ ID NO: 1387 - protein, 438 aa, synthetic construct; identical to SEQ ID NO: 1383

SEQ ID NO: 1388 - protein, 449 aa, synthetic construct; identical to SEQ ID NO: 1308

SEQ ID NO: 1389 - protein, 226 aa, synthetic construct; identical to SEQ ID NO: 1385

SEQ ID NO: 1390 - protein, 214 aa, synthetic construct; identical to SEQ ID NO: 1326

SEQ ID NO: 1391 - protein, 438 aa, synthetic construct; identical to SEQ ID NO: 1383

SEQ ID NO: 1392 - protein, 449 aa, synthetic construct; identical to SEQ ID NO: 1328

SEQ ID NO: 1393 - protein, 226 aa, synthetic construct; identical to SEQ ID NO: 1385

SEQ ID NO: 1394 - protein, 214 aa, synthetic construct; identical to SEQ ID NO: 1330

SEQ ID NO: 1395-1398 - skipped (4 entries)

SEQ ID NO: 1399 - protein, 449 aa, synthetic construct; identical to SEQ ID NO: 189

SEQ ID NO: 1400 - protein, 477 aa, synthetic construct
QVTLRESGPALVKPTQTLTLTCTFSGFSLSTAGMSVGWIRQPPGKALEWLADIWWDDKKHYNPSLKDRLTISKDTSKNQVVLKVTNMDPADTATYYCARDMIFNFYFDVWGQGTTVTVSSGKPGSGKPGSGKPGSGKPGSDIQMTQSPSTLSASVGDRVTITCSASSRVGYMHWYQQKPGKAPKLLIYDTSKLASGVPSRFSGSGSGTEFTLTISSLQPDDFATYYCFQGSGYPFTFGGGTKVEIKEPKSSDKTHTCPPCPAPPVAGPSVFLFPPKPKDTLMISRTPEVTCVVVDVKHEDPEVKFNWYVDGVEVHNAKTKPREEQYNSTYRVVSVLTVLHQDWLNGKEYKCKVSNKALPAPIEKTISKAKGQPREPQVYTLPPSREQMTKNQVKLTCLVKGFYPSDIAVEWESNGQPENNYKTTPPVLDSDGSFFLYSKLTVDKSRWQQGNVFSCSVLHEALHSHYTQKSLSLSPGK

SEQ ID NO: 1401 - protein, 214 aa, synthetic construct; identical to SEQ ID NO: 178

SEQ ID NO: 1402 - protein, 453 aa, synthetic construct; identical to SEQ ID NO: 276

SEQ ID NO: 1403 - protein, 477 aa, synthetic construct; identical to SEQ ID NO: 1400

SEQ ID NO: 1404 - protein, 214 aa, synthetic construct; identical to SEQ ID NO: 278

SEQ ID NO: 1405 - protein, 453 aa, synthetic construct
QVQLVQSGAEVKKPGASVKVSCKASGYDFTYYGISWVRQAPGQGLEWMGWISTYNGNTHYARMLQGRVTMTTDTSTRTAYMELRSLRSDDTAVYYCARENYYGSGAYRGGMDVWGQGTTVTVSSASTKGPSVFPLAPSSKSTSGGTAALGCLVKDYFPEPVTVSWNSGALTSGVHTFPAVLQSSGLYSLSSVVTVPSSSLGTQTYICNVNHKPSNTKVDKKVEPKSCDKTHTCPPCPAPPVAGPSVFLFPPKPKDTLMISRTPEVTCVVVDVKHEDPEVKFNWYVDGVEVHNAKTKPREEQYNSTYRVVSVLTVLHQDWLNGKEYKCKVSNKALPAPIEKTISKAKGQPREPQVYTLPPSREEMTKNQVSLTCLVKGFYPSDIAVEWESNGQPENNYKTTPPVLDSDGSFFLYSKLTVDKSRWQQGNVFSCSVMHEALHNHYTQKSLSLSPGK

SEQ ID NO: 1406 - protein, 214 aa, synthetic construct
EIVLTQSPATLSLSPGERATLSCRASQSVSSYLAWYQQKPGQAPRLLIYDASNRATGIPARFSGSGSGTDFTLTISSLEPEDFAVYYCQQRSNWPWTFGQGTKVEIKRTVAAPSVFIFPPSDEQLKSGTASVVCLLNNFYPREAKVQWKVDNALQSGNSQESVTEQDSKDSTYSLSSTLTLSKADYEKHKVYACEVTHQGLSSPVTKSFNRGEC

SEQ ID NO: 1407 - protein, 446 aa, synthetic construct
QVQLVQSGAEVKKPGASVKVSCKASGFDIQDTYMHWVKQRPGQGLEWMGRIDPASGHTKYDPKFQVRVTITRDTSTSTVYLELSSLRSEDTAVYYCARSGGLPDVWGQGTTVTVSSASTKGPSVFPLAPSSKSTSGGTAALGCLVKDYFPEPVTVSWNSGALTSGVHTFPAVLQSSGLYSLSSVVTVPSSSLGTQTYICNVNHKPSNTKVDKKVEPKSCDKTHTCPPCPAPEAAGGPSVFLFPPKPKDTLMISRTPEVTCVVVDVSHEDPEVKFNWYVDGVEVHNAKTKPREEQYNSTYRVVSVLTVLHQDWLNGKEYKCKVSNKALAAPIEKTISKAKGQPREPQVYTLPPSRDELTKNQVSLTCLVKGFYPSDIAVEWESNGQPENNYKTTPPVLDSDGSFFLYSKLTVDKSRWQQGNVFSCSVMHEALHNHYTQKSLSLSPGK

SEQ ID NO: 1408 - protein, 213 aa, synthetic construct
EIVLTQSPGTLSLSPGERATLSCRASSSVSYMYWYQQKPGQAPRPLIYATSNLASGIPDRFSGSGSGTDFTLTISRLEPEDFAVYYCQQWEGNPRTFGGGTKLEIKRTVAAPSVFIFPPSDEQLKSGTASVVCLLNNFYPREAKVQWKVDNALQSGNSQESVTEQDSKDSTYSLSSTLTLSKADYEKHKVYACEVTHQGLSSPVTKSFNRGEC

SEQ ID NO: 1409 - protein, 448 aa, synthetic construct
QVQLVQSGAEVKKPGASVKVSCKASGYTFTSYDINWVRQAPGQGLEWMGWLNPNSGYTGYAQKFQGRVTMTADRSTSTAYMELSSLRSEDTAVYYCAREVPETAAFEYWGQGTLVTVSSASTKGPSVFPLAPSSKSTSGGTAALGCLVKDYFPEPVTVSWNSGALTSGVHTFPAVLQSSGLYSLSSVVTVPSSSLGTQTYICNVNHKPSNTKVDKKVEPKSCDKTHTCPPCPAPELLGGPSVFLFPPKPKDTLMISRTPEVTCVVVDVSHEDPEVKFNWYVDGVEVHNAKTKPREEQYNSTYRVVSVLTVLHQDWLNGKEYKCKVSNKALPAPIEKTISKAKGQPREPQVYTLPPSRDELTKNQVSLTCLVKGFYPSDIAVEWESNGQPENNYKTTPPVLDSDGSFFLYSKLTVDKSRWQQGNVFSCSVMHEALHNHYTQKSLSLSPG

SEQ ID NO: 1410 - protein, 216 aa, synthetic construct; identical to SEQ ID NO: 317

SEQ ID NO: 1411 - protein, 448 aa, synthetic construct
EVQLVESGGGLVKPGGSLRLSCAASGFTFSNAWMTWVRQAPGKGLEWVGRIKSKIDAGTTDYAAPVKGRFTISRDDSKNTLYLQMNSLKTEDTAVYYCTTDLGWGENYWGQGTLVTVSSASTKGPSVFPLAPSSKSTSGGTAALGCLVKDYFPEPVTVSWNSGALTSGVHTFPAVLQSSGLYSLSSVVTVPSSSLGTQTYICNVNHKPSNTKVDKKVEPKSCDKTHTCPPCPAPPVAGPSVFLFPPKPKDTLMISRTPEVTCVVVDVKHEDPEVKFNWYVDGVEVHNAKTKPREEQYNSTYRVVSVLTVLHQDWLNGKEYKCKVSNKALPAPIEKTISKAKGQPREPQVYTLPPSREEMTKNQVSLTCLVKGFYPSDIAVEWESNGQPENNYKTTPPVLDSDGSFFLYSKLTVDKSRWQQGNVFSCSVLHEALHSHYTQKSLSLSPGK

SEQ ID NO: 1412 - protein, 215 aa, synthetic construct
ENVLTQSPGTLSLSPGERATLSCRASQRVSSSYLVWYQQKPGQAPRLLIYGASSRATGIPDRFSGSGSGTDFTLTISRLEPEDFAVYYCQQYGSSPYTFGQGTKLEIKRTVAAPSVFIFPPSDEQLKSGTASVVCLLNNFYPREAKVQWKVDNALQSGNSQESVTEQDSKDSTYSLSSTLTLSKADYEKHKVYACEVTHQGLSSPVTKSFNRGEC

SEQ ID NO: 1413 - protein, 447 aa, synthetic construct
EVQLVQSGAEVKKPGASVKVSCKASGYTFTGYYMHWVRQAPGQGLEWMGWINPKSGGTNYAQKFQGRVTMTRDTSISTAYMELSRLISDDTAVYYCATGGSFDAFDVWGQGTMVTVSSASTKGPSVFPLAPSSKSTSGGTAALGCLVKDYFPEPVTVSWNSGALTSGVHTFPAVLQSSGLYSLSSVVTVPSSSLGTQTYICNVNHKPSNTKVDKKVEPKSCDKTHTCPPCPAPPVAGPSVFLFPPKPKDTLMISRTPEVTCVVVDVKHEDPEVKFNWYVDGVEVHNAKTKPREEQYNSTYRVVSVLTVLHQDWLNGKEYKCKVSNKALPAPIEKTISKAKGQPREPQVYTLPPSREEMTKNQVSLTCLVKGFYPSDIAVEWESNGQPENNYKTTPPVLDSDGSFFLYSKLTVDKSRWQQGNVFSCSVLHEALHSHYTQKSLSLSPGK

SEQ ID NO: 1414 - protein, 214 aa, synthetic construct
DIVMTQSPSSLSASVGDRVTITCRASQSISSYLNWYQQSPGKAPKILIYGASRLQSGVPSRFSGSGSGTDFTLAISSLQPEDFATYYCQQGDNTPFTFGPGTKLEIKRTVAAPSVFIFPPSDEQLKSGTASVVCLLNNFYPREAKVQWKVDNALQSGNSQESVTEQDSKDSTYSLSSTLTLSKADYEKHKVYACEVTHQGLSSPVTKSFNRGEC

SEQ ID NO: 1415 - protein, 448 aa, synthetic construct
EVQLVESGGGLVQPGGSLRLSCAASGFTFSSFGMHWVRQAPGKGLEWVSYISSGSTTIYYADSVKGRFTISRDNAKNSLYLQMNSLRAEDTAVYYCARAPLLRGAMDYWGQGTLVTVSSASTKGPSVFPLAPSSKSTSGGTAALGCLVKDYFPEPVTVSWNSGALTSGVHTFPAVLQSSGLYSLSSVVTVPSSSLGTQTYICNVNHKPSNTKVDKKVEPKSCDKTHTCPPCPAPPVAGPSVFLFPPKPKDTLMISRTPEVTCVVVDVKHEDPEVKFNWYVDGVEVHNAKTKPREEQYNSTYRVVSVLTVLHQDWLNGKEYKCKVSNKALPAPIEKTISKAKGQPREPQVYTLPPSREEMTKNQVSLTCLVKGFYPSDIAVEWESNGQPENNYKTTPPVLDSDGSFFLYSKLTVDKSRWQQGNVFSCSVMHEALHNHYTQKSLSLSPGK

SEQ ID NO: 1416 - protein, 214 aa, synthetic construct; identical to SEQ ID NO: 224

SEQ ID NO: 1417 - protein, 443 aa, synthetic construct
EVQLVESGGGLVQPGGSLKLSCAASGFDIIDDYIHWVRQASGKGLEWVGRIDPASANTKYVPSVKGRFTISADTSKNTAYLQMNSLKTEDTAVYYCTRKGFAYWGQGTLVTVSSASTKGPSVFPLAPSSKSTSGGTAALGCLVKDYFPEPVTVSWNSGALTSGVHTFPAVLQSSGLYSLSSVVTVPSSSLGTQTYICNVNHKPSNTKVDKKVEPKSCDKTHTCPPCPAPPVAGPSVFLFPPKPKDTLMISRTPEVTCVVVDVKHEDPEVKFNWYVDGVEVHNAKTKPREEQYNSTYRVVSVLTVLHQDWLNGKEYKCKVSNKALPAPIEKTISKAKGQPREPQVYTLPPSREEMTKNQVSLTCLVKGFYPSDIAVEWESNGQPENNYKTTPPVLDSDGSFFLYSKLTVDKSRWQQGNVFSCSVMHEALHNHYTQKSLSLSPGK

SEQ ID NO: 1418 - protein, 214 aa, synthetic construct
NIVMTQTPLSLSVTPGQPASISCKASENVGTYVSWYLQKPGQSPQLLIYGTSNRYTGVPDRFTGSGSATDFTLKISRVEAEDVGVYHCGQSYRYPYTFGGGTKLEIKRTVAAPSVFIFPPSDEQLKSGTASVVCLLNNFYPREAKVQWKVDNALQSGNSQESVTEQDSKDSTYSLSSTLTLSKADYEKHKVYACEVTHQGLSSPVTKSFNRGEC

SEQ ID NO: 1419 - protein, 453 aa, synthetic construct
QVQLVQSGAEVKKPGASVKVSCKVSGFSVTSYNVHWVRQAPGQGLEWMGVMWSGGNTDYNSKFQGRVTMTRDTSTNTVYMELSSLRSEDTAVYYCARAGRYYHDSNYYWDFPYWGQGTLVTVSSASTKGPSVFPLAPSSKSTSGGTAALGCLVKDYFPEPVTVSWNSGALTSGVHTFPAVLQSSGLYSLSSVVTVPSSSLGTQTYICNVNHKPSNTKVDKKVEPKSCDKTHTCPPCPAPPVAGPSVFLFPPKPKDTLMISRTPEVTCVVVDVKHEDPEVKFNWYVDGVEVHNAKTKPREEQYNSTYRVVSVLTVLHQDWLNGKEYKCKVSNKALPAPIEKTISKAKGQPREPQVYTLPPSREEMTKNQVSLTCLVKGFYPSDIAVEWESNGQPENNYKTTPPVLDSDGSFFLYSKLTVDKSRWQQGNVFSCSVLHEALHSHYTQKSLSLSPGK

SEQ ID NO: 1420 - protein, 214 aa, synthetic construct; identical to SEQ ID NO: 278

SEQ ID NO: 1421 - protein, 446 aa, synthetic construct
EVQLVQSGAEVKKPGESLKISCKGSGYSFSNYWIGWVRQMPGKGLEWMGIIDPSNSYTRYSPSFQGQVTISADKSISTAYLQWSSLKASDTAMYYCARWYYKPFDVWGQGTLVTVSSASTKGPSVFPLAPSSKSTSGGTAALGCLVKDYFPEPVTVSWNSGALTSGVHTFPAVLQSSGLYSLSSVVTVPSSSLGTQTYICNVNHKPSNTKVDKKVEPKSCDKTHTCPPCPAPPVAGPSVFLFPPKPKDTLMISRTPEVTCVVVDVKHEDPEVKFNWYVDGVEVHNAKTKPREEQYNSTYRVVSVLTVLHQDWLNGKEYKCKVSNKALPAPIEKTISKAKGQPREPQVYTLPPSREEMTKNQVSLTCLVKGFYPSDIAVEWESNGQPENNYKTTPPVLDSDGSFFLYSKLTVDKSRWQQGNVFSCSVMHEALHNHYTQKSLSLSPGK

SEQ ID NO: 1422 - protein, 217 aa, synthetic construct; identical to SEQ ID NO: 188

SEQ ID NO: 1423 - protein, 444 aa, synthetic construct
QVQLVQSGAEVKKPGSSVKVSCKASGYKFTRYVMHWVRQAPGQGLEWMGYINPYNDGTNYNEKFKGRVTITADKSTSTAYMELSSLRSEDTAVYYCARNWDTGLWGQGTTVTVSSASTKGPSVFPLAPSSKSTSGGTAALGCLVKDYFPEPVTVSWNSGALTSGVHTFPAVLQSSGLYSLSSVVTVPSSSLGTQTYICNVNHKPSNTKVDKKVEPKSCDKTHTCPPCPAPPVAGPSVFLFPPKPKDTLMISRTPEVTCVVVDVKHEDPEVKFNWYVDGVEVHNAKTKPREEQYNSTYRVVSVLTVLHQDWLNGKEYKCKVSNKALPAPIEKTISKAKGQPREPQVYTLPPSREEMTKNQVSLTCLVKGFYPSDIAVEWESNGQPENNYKTTPPVLDSDGSFFLYSKLTVDKSRWQQGNVFSCSVMHEALHNHYTQKSLSLSPGK

SEQ ID NO: 1424 - protein, 214 aa, synthetic construct; identical to SEQ ID NO: 197

SEQ ID NO: 1425 - protein, 448 aa, synthetic construct
EVQLVQSGAEVKKPGESLKISCKGSGYSFTTYWLGWVRQMPGKGLDWIGIMSPVDSDIRYSPSFQGQVTMSVDKSITTAYLQWNSLKASDTAMYYCARRRPGQGYFDFWGQGTLVTVSSASTKGPSVFPLAPSSKSTSGGTAALGCLVKDYFPEPVTVSWNSGALTSGVHTFPAVLQSSGLYSLSSVVTVPSSSLGTQTYICNVNHKPSNTKVDKKVEPKSCDKTHTCPPCPAPPVAGPSVFLFPPKPKDTLMISRTPEVTCVVVDVKHEDPEVKFNWYVDGVEVHNAKTKPREEQYNSTYRVVSVLTVLHQDWLNGKEYKCKVSNKALPAPIEKTISKAKGQPREPQVYTLPPSREEMTKNQVSLTCLVKGFYPSDIAVEWESNGQPENNYKTTPPVLDSDGSFFLYSKLTVDKSRWQQGNVFSCSVMHEALHNHYTQKSLSLSPGK

SEQ ID NO: 1426 - protein, 214 aa, synthetic construct
DIQMTQSPSSLSASVGDRVTITCRASQGISSWLAWYQQKPEKAPKSLIYAASSLQSGVPSRFSGSGSGTDFTLTISSLQPEDFATYYCQQYNIYPYTFGQGTKLEIKRTVAAPSVFIFPPSDEQLKSGTASVVCLLNNFYPREAKVQWKVDNALQSGNSQESVTEQDSKDSTYSLSSTLTLSKADYEKHKVYACEVTHQGLSSPVTKSFNRGEC

SEQ ID NO: 1427 - protein, 124 aa, synthetic construct
QVQLVQSGAEVKKPGASVKVSCKVSGFSVTSYNVHWVRQAPGKGLEWMGVMWSGGNTDYNSKFQGRVTMTRDTSTNTVYMELSSLRSEDTAVYYCARAGRYYHDSNYYWDFPYWGQGTLVTVSS

SEQ ID NO: 1428 - protein, 124 aa, synthetic construct
QVQLVQSGAEVKKPGASVKVSCKVSGFSVTSYNVHWVRQAPGQGLEWMGVMWSGGNTDYASKFQGRVTMTRDTSTNTVYMELSSLRSEDTAVYYCARAGRYYHDSNYYWDFPYWGQGTLVTVSS

SEQ ID NO: 1429 - protein, 124 aa, synthetic construct
QVQLVQSGAEVKKPGASVKVSCKVSGFSVTSYNVHWVRQAPGQGLEWMGVMWSGGNTDYNDKFQGRVTMTRDTSTNTVYMELSSLRSEDTAVYYCARAGRYYHDSNYYWDFPYWGQGTLVTVSS

SEQ ID NO: 1430 - protein, 124 aa, synthetic construct
QVQLVQSGAEVKKPGASVKVSCKVSGFSVTSYNVHWVRQAPGQGLEWMGVMWSGGNTDYNPKFQGRVTMTRDTSTNTVYMELSSLRSEDTAVYYCARAGRYYHDSNYYWDFPYWGQGTLVTVSS

SEQ ID NO: 1431 - protein, 124 aa, synthetic construct
QVQLVQSGAEVKKPGASVKVSCKVSGFSVTSYNVHWVRQAPGQGLEWMGVMWSGGNTDYNQKFQGRVTMTRDTSTNTVYMELSSLRSEDTAVYYCARAGRYYHDSNYYWDFPYWGQGTLVTVSS

SEQ ID NO: 1432 - protein, 124 aa, synthetic construct
QVQLVQSGAEVKKPGASVKVSCKVSGFSVTSYNVHWVRQAPGQGLEWMGVMWSGGNTDYNSKFKGRVTMTRDTSTNTVYMELSSLRSEDTAVYYCARAGRYYHDSNYYWDFPYWGQGTLVTVSS

SEQ ID NO: 1433 - protein, 124 aa, synthetic construct
QVQLVQSGAEVKKPGASVKVSCKVSGFSVTSYNVHWVRQAPGQGLEWMGVMWSGGNTDYNSKFQSRVTMTRDTSTNTVYMELSSLRSEDTAVYYCARAGRYYHDSNYYWDFPYWGQGTLVTVSS

SEQ ID NO: 1434 - protein, 124 aa, synthetic construct
QVQLVQSGAEVKKPGASVKVSCKVSGFSVTSYNVHWVRQAPGKGLEWMGVMWSGGNTDYASKFKGRVTMTRDTSTNTVYMELSSLRSEDTAVYYCARAGRYYHDSNYYWDFPYWGQGTLVTVSS

SEQ ID NO: 1435 - protein, 124 aa, synthetic construct
QVQLVQSGAEVKKPGASVKVSCKVSGFSVTSYNVHWVRQAPGKGLEWMGVMWSGGNTDYNDKFKGRVTMTRDTSTNTVYMELSSLRSEDTAVYYCARAGRYYHDSNYYWDFPYWGQGTLVTVSS

SEQ ID NO: 1436 - protein, 124 aa, synthetic construct
QVQLVQSGAEVKKPGASVKVSCKVSGFSVTSYNVHWVRQAPGKGLEWMGVMWSGGNTDYADKFKGRVTMTRDTSTNTVYMELSSLRSEDTAVYYCARAGRYYHDSNYYWDFPYWGQGTLVTVSS

SEQ ID NO: 1437 - protein, 124 aa, synthetic construct
QVQLVQSGAEVKKPGASVKVSCKASGFSVTSYNVHWVRQAPGQGLEWMGVMWSGGNTDYNSKFQGRVTMTRDTSTNTVYMELSSLRSEDTAVYYCARAGRYYHDSNYYWDFPYWGQGTLVTVSS

SEQ ID NO: 1438 - protein, 124 aa, synthetic construct
QVQLVQSGAEVKKPGASVKVSCKVSGYSVTSYNVHWVRQAPGQGLEWMGVMWSGGNTDYNSKFQGRVTMTRDTSTNTVYMELSSLRSEDTAVYYCARAGRYYHDSNYYWDFPYWGQGTLVTVSS

SEQ ID NO: 1439 - protein, 124 aa, synthetic construct
QVQLVQSGAEVKKPGASVKVSCKVSGFTVTSYNVHWVRQAPGQGLEWMGVMWSGGNTDYNSKFQGRVTMTRDTSTNTVYMELSSLRSEDTAVYYCARAGRYYHDSNYYWDFPYWGQGTLVTVSS

SEQ ID NO: 1440 - protein, 124 aa, synthetic construct
QVQLVQSGAEVKKPGASVKVSCKVSGFSFTSYNVHWVRQAPGQGLEWMGVMWSGGNTDYNSKFQGRVTMTRDTSTNTVYMELSSLRSEDTAVYYCARAGRYYHDSNYYWDFPYWGQGTLVTVSS

SEQ ID NO: 1441 - protein, 124 aa, synthetic construct
QVQLVQSGAEVKKPGASVKVSCKVSGFSVTSYYVHWVRQAPGQGLEWMGVMWSGGNTDYNSKFQGRVTMTRDTSTNTVYMELSSLRSEDTAVYYCARAGRYYHDSNYYWDFPYWGQGTLVTVSS

SEQ ID NO: 1442 - protein, 124 aa, synthetic construct
QVQLVQSGAEVKKPGASVKVSCKVSGFSVTSYNMHWVRQAPGQGLEWMGVMWSGGNTDYNSKFQGRVTMTRDTSTNTVYMELSSLRSEDTAVYYCARAGRYYHDSNYYWDFPYWGQGTLVTVSS

SEQ ID NO: 1443 - protein, 124 aa, synthetic construct
QVQLVQSGAEVKKPGASVKVSCKVSGFSVTSYNLHWVRQAPGQGLEWMGVMWSGGNTDYNSKFQGRVTMTRDTSTNTVYMELSSLRSEDTAVYYCARAGRYYHDSNYYWDFPYWGQGTLVTVSS

SEQ ID NO: 1444 - protein, 124 aa, synthetic construct
QVQLVQSGAEVKKPGASVKVSCKVSGFSVTSYNVHWVRQAPGQGLEWMGWMWSGGNTDYNSKFQGRVTMTRDTSTNTVYMELSSLRSEDTAVYYCARAGRYYHDSNYYWDFPYWGQGTLVTVSS

SEQ ID NO: 1445 - protein, 124 aa, synthetic construct
QVQLVQSGAEVKKPGASVKVSCKVSGFSVTSYNVHWVRQAPGQGLEWMGRMWSGGNTDYNSKFQGRVTMTRDTSTNTVYMELSSLRSEDTAVYYCARAGRYYHDSNYYWDFPYWGQGTLVTVSS

SEQ ID NO: 1446 - protein, 124 aa, synthetic construct
QVQLVQSGAEVKKPGASVKVSCKVSGFSVTSYNVHWVRQAPGQGLEWMGIMWSGGNTDYNSKFQGRVTMTRDTSTNTVYMELSSLRSEDTAVYYCARAGRYYHDSNYYWDFPYWGQGTLVTVSS

SEQ ID NO: 1447 - protein, 124 aa, synthetic construct
QVQLVQSGAEVKKPGASVKVSCKVSGFSVTSYNVHWVRQAPGQGLEWMGGMWSGGNTDYNSKFQGRVTMTRDTSTNTVYMELSSLRSEDTAVYYCARAGRYYHDSNYYWDFPYWGQGTLVTVSS

SEQ ID NO: 1448 - protein, 124 aa, synthetic construct
QVQLVQSGAEVKKPGASVKVSCKVSGFSVTSYNVHWVRQAPGQGLEWMGVIWSGGNTDYNSKFQGRVTMTRDTSTNTVYMELSSLRSEDTAVYYCARAGRYYHDSNYYWDFPYWGQGTLVTVSS

SEQ ID NO: 1449 - protein, 124 aa, synthetic construct
QVQLVQSGAEVKKPGASVKVSCKVSGFSVTSYNVHWVRQAPGQGLEWMGVMWPGGNTDYNSKFQGRVTMTRDTSTNTVYMELSSLRSEDTAVYYCARAGRYYHDSNYYWDFPYWGQGTLVTVSS

SEQ ID NO: 1450 - protein, 124 aa, synthetic construct
QVQLVQSGAEVKKPGASVKVSCKVSGFSVTSYNVHWVRQAPGQGLEWMGVMWSSGNTDYNSKFQGRVTMTRDTSTNTVYMELSSLRSEDTAVYYCARAGRYYHDSNYYWDFPYWGQGTLVTVSS

SEQ ID NO: 1451 - protein, 124 aa, synthetic construct
QVQLVQSGAEVKKPGASVKVSCKVSGFSVTSYNVHWVRQAPGQGLEWMGVMWSGGSTDYNSKFQGRVTMTRDTSTNTVYMELSSLRSEDTAVYYCARAGRYYHDSNYYWDFPYWGQGTLVTVSS

SEQ ID NO: 1452 - protein, 124 aa, synthetic construct
QVQLVQSGAEVKKPGASVKVSCKVSGFSVTSYNVHWVRQAPGQGLEWMGVMWSGGNTDYNHKFQGRVTMTRDTSTNTVYMELSSLRSEDTAVYYCARAGRYYHDSNYYWDFPYWGQGTLVTVSS

SEQ ID NO: 1453 - protein, 124 aa, synthetic construct
QVQLVQSGAEVKKPGASVKVSCKVSGFSVTSYNVHWVRQAPGQGLEWMGVMWSGGNTDYNSKFQGRVTMTRDTSTSTVYMELSSLRSEDTAVYYCARAGRYYHDSNYYWDFPYWGQGTLVTVSS

SEQ ID NO: 1454 - protein, 124 aa, synthetic construct
QVQLVQSGAEVKKPGASVKVSCKVSGFSVTSYNVHWVRQAPGQGLEWMGVMWSGGNTDYNSKFQGRVTMTRDTSTNTVYMELSSLRSEDTAVYYCARAGRYYHDSNYYWYFPYWGQGTLVTVSS

SEQ ID NO: 1455 - protein, 124 aa, synthetic construct
QVQLVQSGAEVKKPGASVKVSCKVSGFSVTSYNVHWVRQAPGQGLEWMGVMWSGGNTDYNSKFQGRVTMTRDTSTNTVYMELSSLRSEDTAVYYCARAGRYYHDSNYYWDFDYWGQGTLVTVSS

SEQ ID NO: 1456 - protein, 124 aa, synthetic construct
QVQLMQSGAEVKKPGASVKVSCKVSGFSVTSYNVHWVRQAPGQGLEWMGVMWSGGNTDYNSKFQGRVTMTRDTSTNTVYMELSSLRSEDTAVYYCARAGRYYHDSNYYWDFPYWGQGTLVTVSS

SEQ ID NO: 1457 - protein, 124 aa, synthetic construct
QVQLVESGAEVKKPGASVKVSCKVSGFSVTSYNVHWVRQAPGQGLEWMGVMWSGGNTDYNSKFQGRVTMTRDTSTNTVYMELSSLRSEDTAVYYCARAGRYYHDSNYYWDFPYWGQGTLVTVSS

SEQ ID NO: 1458 - protein, 124 aa, synthetic construct
QVQLVQSGPEVKKPGASVKVSCKVSGFSVTSYNVHWVRQAPGQGLEWMGVMWSGGNTDYNSKFQGRVTMTRDTSTNTVYMELSSLRSEDTAVYYCARAGRYYHDSNYYWDFPYWGQGTLVTVSS

SEQ ID NO: 1459 - protein, 124 aa, synthetic construct
QVQLVQSGAGVKKPGASVKVSCKVSGFSVTSYNVHWVRQAPGQGLEWMGVMWSGGNTDYNSKFQGRVTMTRDTSTNTVYMELSSLRSEDTAVYYCARAGRYYHDSNYYWDFPYWGQGTLVTVSS

SEQ ID NO: 1460 - protein, 124 aa, synthetic construct
QVQLVQSGAELKKPGASVKVSCKVSGFSVTSYNVHWVRQAPGQGLEWMGVMWSGGNTDYNSKFQGRVTMTRDTSTNTVYMELSSLRSEDTAVYYCARAGRYYHDSNYYWDFPYWGQGTLVTVSS

SEQ ID NO: 1461 - protein, 124 aa, synthetic construct
QVQLVQSGAEVVKPGASVKVSCKVSGFSVTSYNVHWVRQAPGQGLEWMGVMWSGGNTDYNSKFQGRVTMTRDTSTNTVYMELSSLRSEDTAVYYCARAGRYYHDSNYYWDFPYWGQGTLVTVSS

SEQ ID NO: 1462 - protein, 124 aa, synthetic construct
QVQLVQSGAEVKQPGASVKVSCKVSGFSVTSYNVHWVRQAPGQGLEWMGVMWSGGNTDYNSKFQGRVTMTRDTSTNTVYMELSSLRSEDTAVYYCARAGRYYHDSNYYWDFPYWGQGTLVTVSS

SEQ ID NO: 1463 - protein, 124 aa, synthetic construct
QVQLVQSGAEVKKPSASVKVSCKVSGFSVTSYNVHWVRQAPGQGLEWMGVMWSGGNTDYNSKFQGRVTMTRDTSTNTVYMELSSLRSEDTAVYYCARAGRYYHDSNYYWDFPYWGQGTLVTVSS

SEQ ID NO: 1464 - protein, 124 aa, synthetic construct
QVQLVQSGAEVKKPGESVKVSCKVSGFSVTSYNVHWVRQAPGQGLEWMGVMWSGGNTDYNSKFQGRVTMTRDTSTNTVYMELSSLRSEDTAVYYCARAGRYYHDSNYYWDFPYWGQGTLVTVSS

SEQ ID NO: 1465 - protein, 124 aa, synthetic construct
QVQLVQSGAEVKKPGATVKVSCKVSGFSVTSYNVHWVRQAPGQGLEWMGVMWSGGNTDYNSKFQGRVTMTRDTSTNTVYMELSSLRSEDTAVYYCARAGRYYHDSNYYWDFPYWGQGTLVTVSS

SEQ ID NO: 1466 - protein, 124 aa, synthetic construct
QVQLVQSGAEVKKPGASLKVSCKVSGFSVTSYNVHWVRQAPGQGLEWMGVMWSGGNTDYNSKFQGRVTMTRDTSTNTVYMELSSLRSEDTAVYYCARAGRYYHDSNYYWDFPYWGQGTLVTVSS

SEQ ID NO: 1467 - protein, 124 aa, synthetic construct
QVQLVQSGAEVKKPGASVSVSCKVSGFSVTSYNVHWVRQAPGQGLEWMGVMWSGGNTDYNSKFQGRVTMTRDTSTNTVYMELSSLRSEDTAVYYCARAGRYYHDSNYYWDFPYWGQGTLVTVSS

SEQ ID NO: 1468 - protein, 124 aa, synthetic construct
QVQLVQSGAEVKKPGASVKLSCKVSGFSVTSYNVHWVRQAPGQGLEWMGVMWSGGNTDYNSKFQGRVTMTRDTSTNTVYMELSSLRSEDTAVYYCARAGRYYHDSNYYWDFPYWGQGTLVTVSS

SEQ ID NO: 1469 - protein, 124 aa, synthetic construct
QVQLVQSGAEVKKPGASVKVTCKVSGFSVTSYNVHWVRQAPGQGLEWMGVMWSGGNTDYNSKFQGRVTMTRDTSTNTVYMELSSLRSEDTAVYYCARAGRYYHDSNYYWDFPYWGQGTLVTVSS

SEQ ID NO: 1470 - protein, 124 aa, synthetic construct
QVQLVQSGAEVKKPGASVKVSCTVSGFSVTSYNVHWVRQAPGQGLEWMGVMWSGGNTDYNSKFQGRVTMTRDTSTNTVYMELSSLRSEDTAVYYCARAGRYYHDSNYYWDFPYWGQGTLVTVSS

SEQ ID NO: 1471 - protein, 124 aa, synthetic construct
QVQLVQSGAEVKKPGASVKVSCKVSGFSLTSYNVHWVRQAPGQGLEWMGVMWSGGNTDYNSKFQGRVTMTRDTSTNTVYMELSSLRSEDTAVYYCARAGRYYHDSNYYWDFPYWGQGTLVTVSS

SEQ ID NO: 1472 - protein, 124 aa, synthetic construct
QVQLVQSGAEVKKPGASVKVSCKVSGFSVTTYNVHWVRQAPGQGLEWMGVMWSGGNTDYNSKFQGRVTMTRDTSTNTVYMELSSLRSEDTAVYYCARAGRYYHDSNYYWDFPYWGQGTLVTVSS

SEQ ID NO: 1473 - protein, 124 aa, synthetic construct
QVQLVQSGAEVKKPGASVKVSCKVSGFSVTSYNVHWFRQAPGQGLEWMGVMWSGGNTDYNSKFQGRVTMTRDTSTNTVYMELSSLRSEDTAVYYCARAGRYYHDSNYYWDFPYWGQGTLVTVSS

SEQ ID NO: 1474 - protein, 124 aa, synthetic construct
QVQLVQSGAEVKKPGASVKVSCKVSGFSVTSYNVHWVRQPPGQGLEWMGVMWSGGNTDYNSKFQGRVTMTRDTSTNTVYMELSSLRSEDTAVYYCARAGRYYHDSNYYWDFPYWGQGTLVTVSS

SEQ ID NO: 1475 - protein, 124 aa, synthetic construct
QVQLVQSGAEVKKPGASVKVSCKVSGFSVTSYNVHWVRQAPGQGLEWMGVMWSGGGTDYNSKFQGRVTMTRDTSTNTVYMELSSLRSEDTAVYYCARAGRYYHDSNYYWDFPYWGQGTLVTVSS

SEQ ID NO: 1476 - protein, 124 aa, synthetic construct
QVQLVQSGAEVKKPGASVKVSCKVSGFSVTSYNVHWVRQAPGQGLEWMGVMWSGGNTDYNSKFQGRVSMTRDTSTNTVYMELSSLRSEDTAVYYCARAGRYYHDSNYYWDFPYWGQGTLVTVSS

SEQ ID NO: 1477 - protein, 124 aa, synthetic construct
QVQLVQSGAEVKKPGASVKVSCKVSGFSVTSYNVHWVRQAPGQGLEWMGVMWSGGNTDYNSKFQGRVTMTRDTSTNTLYMELSSLRSEDTAVYYCARAGRYYHDSNYYWDFPYWGQGTLVTVSS

SEQ ID NO: 1478 - protein, 124 aa, synthetic construct
QVQLVQSGAEVKKPGASVKVSCKVSGFSVTSYNVHWVRQAPGQGLEWMGVMWSGGNTDYNSKFQGRVTMTRDTSTNTVYMELSSLRSEDTAVYYCARAGRYYHDDNYYWDFPYWGQGTLVTVSS

SEQ ID NO: 1479 - protein, 124 aa, synthetic construct
QVQLVQSGAEVKKPGASVKVSCKVSGFSVTSYNVHWVRQAPGQGLEWMGVMWSGGNTDYNSKFQGRVTMTRDTSTNTVYMELSSLRSEDTAVYYCARAGRYYYDSNYYWDFPYWGQGTLVTVSS

SEQ ID NO: 1480 - protein, 124 aa, synthetic construct
QVQLVQSGAEVKKPGASVKVSCKVSGFSVTSYNVHWVRQAPGQGLEWMGVMWSGGNTDYNSKFQGRVTMTRDTSTNTVYMELSSLRSEDTAVYYCARAGRYYHDSSYYWDFPYWGQGTLVTVSS

SEQ ID NO: 1481 - protein, 124 aa, synthetic construct
QVQLVQSGAEVKKPGASVKVSCKVSGFSVTSYNVHWVRQAPGQGLEWMGVMWSGGNTDYNSKFQGRVTMTRDTSTNTVYMELSSLRSEDTAVYYCARAGRYYHDSNYYWDFAYWGQGTLVTVSS

SEQ ID NO: 1482 - protein, 124 aa, synthetic construct
QVQLVQSGAEVKKPGASVKVSCKVSGFSVTSYNVHWVRQAPGQGLEWMGVMWSGGNTDYNSKFQGRVTMTRDTSTNTVYMELSSLRSEDTAVYYCARAGRYYHDSNYYWDFNYWGQGTLVTVSS

SEQ ID NO: 1483 - protein, 124 aa, synthetic construct
QVQLVQSGAEVKKPGASVKVSCKVSGFSLTTYNVHWVRQAPGQGLEWMGVMWSGGGTDYNSKFQGRVSMTRDTSTNTVYMELSSLRSEDTAVYYCARAGRYYYDDSYYWDFNYWGQGTLVTVSS

SEQ ID NO: 1484 - protein, 124 aa, synthetic construct
QVQLVQSGAEVKKPGASVKVSCKVSGFSLTSYNVHWFRQAPGQGLEWMGVMWSGGSTDYNSKFQGRVSMTRDTSTNTLYMELSSLRSEDTAVYYCARAGRYYYDDSYYWDFAYWGQGTLVTVSS

SEQ ID NO: 1485 - protein, 124 aa, synthetic construct
QVQLVQSGAEVKKPGASVKVSCKVSGFSLTTYNVHWFRQAPGQGLEWMGVMWSGGSTDYNSKFQGRVSMTRDTSTNTLYMELSSLRSEDTAVYYCARAGRYYYDDSYYWDFNYWGQGTLVTVSS

SEQ ID NO: 1486 - protein, 124 aa, synthetic construct
QVQLVQSGAEVKKPGASVKVSCKVSGFSLTTYNVHWFRQAPGQGLEWMGVMWSGGSTDYNSKFQGRVSMTRDTSTNTLYMELSSLRSEDTAVYYCARAGRYYYDDSYYWDFAYWGQGTLVTVSS

SEQ ID NO: 1487 - protein, 124 aa, synthetic construct
QVQLVQSGAEVKKPGASVKVSCKVSGFSLTTYNVHWFRQAPGQGLEWMGVMWSGGGTDYNSKFQGRVSMTRDTSTNTLYMELSSLRSEDTAVYYCARAGRYYYDDSYYWDFNYWGQGTLVTVSS

SEQ ID NO: 1488 - protein, 124 aa, synthetic construct
QVQLVQSGAEVKKPGASVKVSCKVSGFSLTTYNVHWFRQAPGQGLEWMGVMWSGGGTDYNSKFQGRVSMTRDTSTNTLYMELSSLRSEDTAVYYCARAGRYYYDDSYYWDFAYWGQGTLVTVSS

SEQ ID NO: 1489 - protein, 124 aa, synthetic construct
QVQLVQSGAEVKKPGASVKVSCKVSGFSVTTYNVHWVRQAPGQGLEWMGVMWSGGGTDYNSKFQGRVTMTRDTSTNTVYMELSSLRSEDTAVYYCARAGRYYYDDSYYWDFAYWGQGTLVTVSS

SEQ ID NO: 1490 - protein, 124 aa, synthetic construct
QVQLVQSGAEVKKPGASVKVSCKVSGFSVTTYNVHWVRQAPGQGLEWMGVMWSGGGTDYNSKFQGRVTMTRDTSTNTVYMELSSLRSEDTAVYYCARAGRYYYDDSYYWDFNYWGQGTLVTVSS

SEQ ID NO: 1491 - protein, 124 aa, synthetic construct
QVQLVQSGAEVKKPGASVKVSCKVSGFSVTTYNVHWVRQAPGQGLEWMGVMWSGGSTDYNSKFQGRVTMTRDTSTNTVYMELSSLRSEDTAVYYCARAGRYYYDDSYYWDFAYWGQGTLVTVSS

SEQ ID NO: 1492 - protein, 124 aa, synthetic construct
QVQLVQSGAEVKKPGASVKVSCKVSGFSVTTYNVHWVRQAPGQGLEWMGVMWSGGSTDYNSKFQGRVTMTRDTSTNTVYMELSSLRSEDTAVYYCARAGRYYYDDSYYWDFNYWGQGTLVTVSS

SEQ ID NO: 1493 - protein, 124 aa, synthetic construct
QVQLVQSGAEVKKPGASVKVSCKVSGFSVTSYNVHWVRQAPGQGLEWMGVMWSGGSTDYNSKFQGRVTMTRDTSTNTVYMELSSLRSEDTAVYYCARAGRYYYDDSYYWDFAYWGQGTLVTVSS

SEQ ID NO: 1494 - protein, 124 aa, synthetic construct
QVQLVQSGAEVKKPGASVKVSCKVSGFPVTSYNVHWVRQAPGQGLEWMGVMWSGVNTVYNSKFQGRVTMTRDTSTNTVYMELSSLRSEDTAVYYCARAGRYYHDSNYYWDFPYWGQGTLVTVSS

SEQ ID NO: 1495 - protein, 124 aa, synthetic construct
QVQLVQSGAEVKKPGASVKVSCKVSGFMVTSGNVHWVRQAPGQGLEWMGVMHRGGNTDYNSKFQGRVTMTRDTSTNTVYMELSSLRSEDTAVYYCARAGRYYHDSNYYWDFPYWGQGTLVTVSS

SEQ ID NO: 1496 - protein, 124 aa, synthetic construct
QVQLVQSGAEVKKPGASVKVSCKVSGFSVGSFNVHWVRQAPGQGLEWMGVMWTGGNTDYNSKFQGRVTMTRDTSTNTVYMELSSLRSEDTAVYYCARAGRYYHDSNYYWDFPYWGQGTLVTVSS

SEQ ID NO: 1497 - protein, 124 aa, synthetic construct
QVQLVQSGAEVKKPGASVKVSCKVSGFRVTSYNVHWVRQAPGQGLEWMGVMWSGVNTDYNSKFQGRVTMTRDTSTNTVYMELSSLRSEDTAVYYCARAGRYYHDSNYYWDFPYWGQGTLVTVSS

SEQ ID NO: 1498 - protein, 124 aa, synthetic construct
QVQLVQSGAEVKKPGASVKVSCKVSGFSVTWYNVHWVRQAPGQGLEWMGVMWSGGNTGYNSKFQGRVTMTRDTSTNTVYMELSSLRSEDTAVYYCARAGRYYHDSNYYWDFPYWGQGTLVTVSS

SEQ ID NO: 1499 - protein, 124 aa, synthetic construct
QVQLVQSGAEVKKPGASVKVSCKVSGFSVTSGNVHWVRQAPGQGLEWMGVMWRGGNTDYNSKFQGRVTMTRDTSTNTVYMELSSLRSEDTAVYYCARAGRYYHDSNYYWDFPYWGQGTLVTVSS

SEQ ID NO: 1500 - protein, 124 aa, synthetic construct
QVQLVQSGAEVKKPGASVKVSCKVSGFGVTSYNVHWVRQAPGQGLEWMGVMWSGGNTGYNSKFQGRVTMTRDTSTNTVYMELSSLRSEDTAVYYCARAGRYYHDSNYYWDFPYWGQGTLVTVSS

SEQ ID NO: 1501 - protein, 124 aa, synthetic construct
QVQLVQSGAEVKKPGASVKVSCKVSGFSVLSYNVHWVRQAPGQGLEWMGVMLRGGNTDYNSKFQGRVTMTRDTSTNTVYMELSSLRSEDTAVYYCARAGRYYHDSNYYWDFPYWGQGTLVTVSS

SEQ ID NO: 1502 - protein, 124 aa, synthetic construct
QVQLVQSGAEVKKPGASVKVSCKVSGFSVDSYNVHWVRQAPGQGLEWMGVMWRGGNTAYNSKFQGRVTMTRDTSTNTVYMELSSLRSEDTAVYYCARGGRYYHSSNYYWDFPYWGQGTLVTVSS

SEQ ID NO: 1503 - protein, 124 aa, synthetic construct
QVQLVQSGAEVKKPGASVKVSCKVSGFSPTSYNVHWVRQAPGQGLEWMGVMWSAGNTDYNSKFQGRVTMTRDTSTNTVYMELSSLRSEDTAVYYCARAGRYYHDSNYYWDFPYWGQGTLVTVSS

SEQ ID NO: 1504 - protein, 124 aa, synthetic construct
QVQLVQSGAEVKKPGASVKVSCKVSGFRVTSYNVHWVRQAPGQGLEWMGVMGSGMNTDYNSKFQGRVTMTRDTSTNTVYMELSSLRSEDTAVYYCARAGRYYHLSNYYWDFPYWGQGTLVTVSS

SEQ ID NO: 1505 - protein, 124 aa, synthetic construct
QVQLVQSGAEVKKPGASVKVSCKVSGFKVTSYNVHWVRQAPGQGLEWMGVMWSGGNTAYNSKFQGRVTMTRDTSTNTVYMELSSLRSEDTAVYYCARAGRYYHDSNYYWDFPYWGQGTLVTVSS

SEQ ID NO: 1506 - protein, 124 aa, synthetic construct
QVQLVQSGAEVKKPGASVKVSCKVSGFTVTSYNVHWVRQAPGQGLEWMGVMWSGTNTDYNSKFQGRVTMTRDTSTNTVYMELSSLRSEDTAVYYCARAGRYYHDSNYYWDFPYWGQGTLVTVSS

SEQ ID NO: 1507 - protein, 124 aa, synthetic construct
QVQLVQSGAEVKKPGASVKVSCKVSGFGVPSYNVHWVRQAPGQGLEWMGVMWGRGNTDYNSKFQGRVTMTRDTSTNTVYMELSSLRSEDTAVYYCARAGRYYHDSNYYWDFPYWGQGTLVTVSS

SEQ ID NO: 1508 - protein, 124 aa, synthetic construct
QVQLVQSGAEVKKPGASVKVSCKVSGFSVVSYNVHWVRQAPGQGLEWMGVMWSSMNTDYNSKFQGRVTMTRDTSTNTVYMELSSLRSEDTAVYYCARAGRYYHDSNYYWDFPYWGQGTLVTVSS

SEQ ID NO: 1509 - protein, 124 aa, synthetic construct
QVQLVQSGAEVKKPGASVKVSCKVSGFSVISYRVHWVRQAPGQGLEWMGVMWSGENTDYNSKFQGRVTMTRDTSTNTVYMELSSLRSEDTAVYYCARAGRYYHDSRYYWDFPYWGQGTLVTVSS

SEQ ID NO: 1510 - protein, 124 aa, synthetic construct
QVQLVQSGAEVKKPGASVKVSCKVSGFVVTSYNVHWVRQAPGQGLEWMGVMWSKGNTDYNSKFQGRVTMTRDTSTNTVYMELSSLRSEDTAVYYCARAGRYYHDSNYYWDFPYWGQGTLVTVSS

SEQ ID NO: 1511 - protein, 124 aa, synthetic construct
QVQLVQSGAEVKKPGASVKVSCKVSGFSVGSYNVHWVRQAPGQGLEWMGVMWSGGNLDYNSKFQGRVTMTRDTSTNTVYMELSSLRSEDTAVYYCARAGRYYHDSNYYWDFPYWGQGTLVTVSS

SEQ ID NO: 1512 - protein, 124 aa, synthetic construct
QVQLVQSGAEVKKPGASVKVSCKVSGFSVDSYNVHWVRQAPGQGLEWMGVMWSRGNTDYNSKFQGRVTMTRDTSTNTVYMELSSLRSEDTAVYYCARAGRYYHDSNYYWDFPYWGQGTLVTVSS

SEQ ID NO: 1513 - protein, 124 aa, synthetic construct
QVQLVQSGAEVKKPGASVKVSCKVSGFSVTGYNVHWVRQAPGQGLEWMGVMWSGSNTDYNSKFQGRVTMTRDTSTNTVYMELSSLRSEDTAVYYCARAGRYYHDSKYYWDFPYWGQGTLVTVSS

SEQ ID NO: 1514 - protein, 124 aa, synthetic construct
QVQLVQSGAEVKKPGASVKVSCKVSGFSVHGYNVHWVRQAPGQGLEWMGVMSSGGNTDYNSKFQGRVTMTRDTSTNTVYMELSSLRSEDTAVYYCARAGRYYHDSNYYWDFPYWGQGTLVTVSS

SEQ ID NO: 1515 - protein, 124 aa, synthetic construct
QVQLVQSGAEVKKPGASVKVSCKVSGFSVGSMNVHWVRQAPGQGLEWMGVMSSGGNTDYNSKFQGRVTMTRDTSTNTVYMELSSLRSEDTAVYYCARAGRYYHDSNYYWDFPYWGQGTLVTVSS

SEQ ID NO: 1516 - protein, 124 aa, synthetic construct
QVQLVQSGAEVKKPGASVKVSCKVSGFSVTSYHVHWVRQAPGQGLEWMGVMWSGGNTDYNSKFQGRVTMTRDTSTNTVYMELSSLRSEDTAVYYCARAGRYYSDSNYYWDFPYWGQGTLVTVSS

SEQ ID NO: 1517 - protein, 124 aa, synthetic construct
QVQLVQSGAEVKKPGASVKVSCKVSGFSVSSYNVHWVRQAPGQGLEWMGVMWSGGNTDYNSKFQGRVTMTRDTSTNTVYMELSSLRSEDTAVYYCARAGRYYHDSNYYWDFPYWGQGTLVTVSS

SEQ ID NO: 1518 - protein, 124 aa, synthetic construct
QVQLVQSGAEVKKPGASVKVSCKVSGFSVTNYNVHWVRQAPGQGLEWMGVMWSGGNRDYNSKFQGRVTMTRDTSTNTVYMELSSLRSEDTAVYYCARAGRYYHDSNYYWDFPYWGQGTLVTVSS

SEQ ID NO: 1519 - protein, 124 aa, synthetic construct
QVQLVQSGAEVKKPGASVKVSCKVSGFSVTAYNVHWVRQAPGQGLEWMGVMYSGGNTDYNSKFQGRVTMTRDTSTNTVYMELSSLRSEDTAVYYCARAGRYYHDSNYYWDFPYWGQGTLVTVSS

SEQ ID NO: 1520 - protein, 124 aa, synthetic construct
QVQLVQSGAEVKKPGASVKVSCKVSGRSVTSYNVHWVRQAPGQGLEWMGVMWFGGNTDYNSKFQGRVTMTRDTSTNTVYMELSSLRSEDTAVYYCARAGRYYHDSNYYWDFPYWGQGTLVTVSS

SEQ ID NO: 1521 - protein, 124 aa, synthetic construct
QVQLVQSGAEVKKPGASVKVSCKVSGFYVWSYNVHWVRQAPGQGLEWMGVMWKGANTDYNSKFQGRVTMTRDTSTNTVYMELSSLRSEDTAVYYCARAGRYYHDSNYYWDFPYWGQGTLVTVSS

SEQ ID NO: 1522 - protein, 124 aa, synthetic construct
QVQLVQSGAEVKKPGASVKVSCKVSGFSVRSYNVHWVRQAPGQGLEWMGVMWSGGNTGYNSKFQGRVTMTRDTSTNTVYMELSSLRSEDTAVYYCARAGRYYHDSNYYWDFPYWGQGTLVTVSS

SEQ ID NO: 1523 - protein, 124 aa, synthetic construct
QVQLVQSGAEVKKPGASVKVSCKVSGESVTSRNVHWVRQAPGQGLEWMGVMWRGGNTDYNSKFQGRVTMTRDTSTNTVYMELSSLRSEDTAVYYCARAGRYYHDSNYYWDFPYWGQGTLVTVSS

SEQ ID NO: 1524 - protein, 124 aa, synthetic construct
QVQLVQSGAEVKKPGASVKVSCKVSGWSVTSSNVHWVRQAPGQGLEWMGVMLSGGNRPYNSKFQGRVTMTRDTSTNTVYMELSSLRSEDTAVYYCARAGRYYHDSNYYWDFPYWGQGTLVTVSS

SEQ ID NO: 1525 - protein, 124 aa, synthetic construct
QVQLVQSGAEVKKPGASVKVSCKVSGFSVTHYNVHWVRQAPGQGLEWMGVMWSGRNTDYNSKFQGRVTMTRDTSTNTVYMELSSLRSEDTAVYYCARAGRYYSDSNYYWDFPYWGQGTLVTVSS

SEQ ID NO: 1526 - protein, 124 aa, synthetic construct
QVQLVQSGAEVKKPGASVKVSCKVSGFSVVSYNVHWVRQAPGQGLEWMGVMWSKGNTDYNSKFQGRVTMTRDTSTNTVYMELSSLRSEDTAVYYCARAGRYYHDSNYYWDFPYWGQGTLVTVSS

SEQ ID NO: 1527 - protein, 124 aa, synthetic construct
QVQLVQSGAEVKKPGASVKVSCKVSGFRVTSYNVHWVRQAPGQGLEWMGVMGSGGNTDYNSKFQGRVTMTRDTSTNTVYMELSSLRSEDTAVYYCARAGRYYHDSNYYWDFPYWGQGTLVTVSS

SEQ ID NO: 1528 - protein, 124 aa, synthetic construct
QVQLVQSGAEVKKPGASVKVSCKVSGFSVRSYYVHWVRQAPGQGLEWMGVMWSGSNSDYNSKFQGRVTMTRDTSTNTVYMELSSLRSEDTAVYYCARAGRYYHDSNYYWDFPYWGQGTLVTVSS

SEQ ID NO: 1529 - protein, 124 aa, synthetic construct
QVQLVQSGAEVKKPGASVKVSCKVSGFSVTSYNVHWVRQAPGQGLEWMGVMWLGLNTDYNSKFQGRVTMTRDTSTNTVYMELSSLRSEDTAVYYCARAGRYYHDSNYYWDFPYWGQGTLVTVSS

SEQ ID NO: 1530 - protein, 124 aa, synthetic construct
QVQLVQSGAEVKKPGASVKVSCKVSGFMVSSYNVHWVRQAPGQGLEWMGVMASRGNTSYNSKFQGRVTMTRDTSTNTVYMELSSLRSEDTAVYYCARAGRYYHDSNYYWDFPYWGQGTLVTVSS

SEQ ID NO: 1531 - protein, 124 aa, synthetic construct
QVQLVQSGAEVKKPGASVKVSCKVSGFPVTSYNVHWVRQAPGQGLEWMGVMHSGGNTDYNSKFQGRVTMTRDTSTNTVYMELSSLRSEDTAVYYCARAGRYYHDSEYYWDFPYWGQGTLVTVSS

SEQ ID NO: 1532 - protein, 124 aa, synthetic construct
QVQLVQSGAEVKKPGASVKVSCKVSGFSVTLYNVHWVRQAPGQGLEWMGVMWSRGNTDYNSKFQGRVTMTRDTSTNTVYMELSSLRSEDTAVYYCARAGRYYHDSNYYWDFPYWGQGTLVTVSS

SEQ ID NO: 1533 - protein, 124 aa, synthetic construct
QVQLVQSGAEVKKPGASVKVSCKVSGFSVNSYLVHWVRQAPGQGLEWMGVMWMGGNRDYNSKFQGRVTMTRDTSTNTVYMELSSLRSEDTAVYYCARAGRYYHDSNYYWDFPYWGQGTLVTVSS

SEQ ID NO: 1534 - protein, 124 aa, synthetic construct
QVQLVQSGAEVKKPGASVKVSCKVSGFLVTSYNVHWVRQAPGQGLEWMGVMWRGGNTDYNSKFQGRVTMTRDTSTNTVYMELSSLRSEDTAVYYCARAGRYYHDSNYYWDFPYWGQGTLVTVSS

SEQ ID NO: 1535 - protein, 124 aa, synthetic construct
QVQLVQSGAEVKKPGASVKVSCKVSGFSVTSYNVHWVRQAPGQGLEWMGVMWSRGNTDYNSKFQGRVTMTRDTSTNTVYMELSSLRSEDTAVYYCARAGRYYHGSNYYWDFPYWGQGTLVTVSS

SEQ ID NO: 1536 - protein, 124 aa, synthetic construct
QVQLVQSGAEVKKPGASVKVSCKVSGFSVTGHNVHWVRQAPGQGLEWMGVMWHGGNTDYNSKFQGRVTMTRDTSTNTVYMELSSLRSEDTAVYYCARAGRYYHDSNYYWDFPYWGQGTLVTVSS

SEQ ID NO: 1537 - protein, 124 aa, synthetic construct
QVQLVQSGAEVKKPGASVKVSCKVSGFMVTSYNVHWVRQAPGQGLEWMGVMWFGGNTDYNSKFQGRVTMTRDTSTNTVYMELSSLRSEDTAVYYCARAGRYYHDSNYYWDFPYWGQGTLVTVSS

SEQ ID NO: 1538 - protein, 124 aa, synthetic construct
QVQLVQSGAEVKKPGASVKVSCKVSGFSVTSMNVHWVRQAPGQGLEWMGVMWSVGNTDYNSKFQGRVTMTRDTSTNTVYMELSSLRSEDTAVYYCARAGRYYHDSNYYWDFPYWGQGTLVTVSS

SEQ ID NO: 1539 - protein, 124 aa, synthetic construct
QVQLVQSGAEVKKPGASVKVSCKVSGFKVTGYNVHWVRQAPGQGLEWMGVMWSGSNVDYNSKFQGRVTMTRDTSTNTVYMELSSLRSEDTAVYYCARAGRYYHDSNYYWDFPYWGQGTLVTVSS

SEQ ID NO: 1540 - protein, 124 aa, synthetic construct
QVQLVQSGAEVKKPGASVKVSCKVSGFSVTAYNVHWVRQAPGQGLEWMGVMWSGGNTDYNSKFQGRVTMTRDTSTNTVYMELSSLRSEDTAVYYCARAGRYYHDSNYYWDFPYWGQGTLVTVSS

SEQ ID NO: 1541 - protein, 124 aa, synthetic construct
QVQLVQSGAEVKKPGASVKVSCKVSGFSVTSYNVHWVRQAPGQGLEWMGVMASGGNTDYNSKFQGRVTMTRDTSTNTVYMELSSLRSEDTAVYYCARAGRYYHRSNYYWDFPYWGQGTLVTVSS

SEQ ID NO: 1542 - protein, 124 aa, synthetic construct
QVQLVQSGAEVKKPGASVKVSCKVSGFSVQSWNVHWVRQAPGQGLEWMGVMWSGGNSDYNSKFQGRVTMTRDTSTNTVYMELSSLRSEDTAVYYCARAGRYYHDSNYYWDFPYWGQGTLVTVSS

SEQ ID NO: 1543 - protein, 124 aa, synthetic construct
QVQLVQSGAEVKKPGASVKVSCKVSGFSVGSYNVHWVRQAPGQGLEWMGVMWSGGQTDYNSKFQGRVTMTRDTSTNTVYMELSSLRSEDTAVYYCARAGRYYHDSNYYWDFPYWGQGTLVTVSS

SEQ ID NO: 1544 - protein, 124 aa, synthetic construct
QVQLVQSGAEVKKPGASVKVSCKVSGFSVLSYNVHWVRQAPGQGLEWMGVMWIGGNTDYNSKFQGRVTMTRDTSTNTVYMELSSLRSEDTAVYYCARAGRYYHDSNYYWDFPYWGQGTLVTVSS

SEQ ID NO: 1545 - protein, 124 aa, synthetic construct
QVQLVQSGAEVKKPGASVKVSCKVSGFSVSSYNVHWVRQAPGQGLEWMGVMWLGGNTDYNSKFQGRVTMTRDTSTNTVYMELSSLRSEDTAVYYCARAGRYYHDSNYYWDFPYWGQGTLVTVSS

SEQ ID NO: 1546 - protein, 124 aa, synthetic construct
QVQLVQSGAEVKKPGASVKVSCKVSGFAVTSYNVHWVRQAPGQGLEWMGVMWFGGNTDYNSKFQGRVTMTRDTSTNTVYMELSSLRSEDTAVYYCARAGRYYHDSNYYWDFPYWGQGTLVTVSS

SEQ ID NO: 1547 - protein, 124 aa, synthetic construct
QVQLVQSGAEVKKPGASVKVSCKVSGFTVTSQNVHWVRQAPGQGLEWMGVMWSAGNTAYNSKFQGRVTMTRDTSTNTVYMELSSLRSEDTAVYYCARAGRYYHDSNYYWDFPYWGQGTLVTVSS

SEQ ID NO: 1548 - protein, 124 aa, synthetic construct
QVQLVQSGAEVKKPGASVKVSCKVSGFSVVSYNVHWVRQAPGQGLEWMGVMWSGGNRDYNSKFQGRVTMTRDTSTNTVYMELSSLRSEDTAVYYCARAGRYYHDSNYYWDFPYWGQGTLVTVSS

SEQ ID NO: 1549 - protein, 124 aa, synthetic construct
QVQLVQSGAEVKKPGASVKVSCKVSGFSVVSYNVHWVRQAPGQGLEWMGVMWVGGNTDYNSKFQGRVTMTRDTSTNTVYMELSSLRSEDTAVYYCARAGRYYHDSNYYWDFPYWGQGTLVTVSS

SEQ ID NO: 1550 - protein, 124 aa, synthetic construct
QVQLVQSGAEVKKPGASVKVSCKVSGFSVMSYNVHWVRQAPGQGLEWMGVMWSGRNTDYNSKFQGRVTMTRDTSTNTVYMELSSLRSEDTAVYYCARAGRYYHDSNYYWDFPYWGQGTLVTVSS

SEQ ID NO: 1551 - protein, 124 aa, synthetic construct
QVQLVQSGAEVKKPGASVKVSCKVSGFRVTSYNVHWVRQAPGQGLEWMGVMWSGGNTDYNSKFQGRVTMTRDTSTNTVYMELSSLRSEDTAVYYCARAGRYYHDSNYYWDFPYWGQGTLVTVSS

SEQ ID NO: 1552 - protein, 124 aa, synthetic construct
QVQLVQSGAEVKKPGASVKVSCKVSGFSVTSYPVHWVRQAPGQGLEWMGVMWSGMNTDYNSKFQGRVTMTRDTSTNTVYMELSSLRSEDTAVYYCARAGRYYHDSNYYWDFPYWGQGTLVTVSS

SEQ ID NO: 1553 - protein, 124 aa, synthetic construct
QVQLVQSGAEVKKPGASVKVSCKVSGFSVLSYNVHWVRQAPGQGLEWMGVMWSKGNTDYNSKFQGRVTMTRDTSTNTVYMELSSLRSEDTAVYYCARAGRYYHDSNYYWDFPYWGQGTLVTVSS

SEQ ID NO: 1554 - protein, 124 aa, synthetic construct
QVQLVQSGAEVKKPGASVKVSCKVSGFSVTSYPVHWVRQAPGQGLEWMGVMWSGGKTDYNSKFQGRVTMTRDTSTNTVYMELSSLRSEDTAVYYCARAGRYYHDSNYYWDFPYWGQGTLVTVSS

SEQ ID NO: 1555 - protein, 124 aa, synthetic construct
QVQLVQSGAEVKKPGASVKVSCKVSGFSVVSYNVHWVRQAPGQGLEWMGVMWSGGNTYYNSKFQGRVTMTRDKSTNTVYMELSSLRSEDTAVYYCARAGRYYHDSNYYWDFPYWGQGTLVTVSS

SEQ ID NO: 1556 - protein, 124 aa, synthetic construct
QVQLVQSGAEVKKPGASVKVSCKVSGFSVTSYWVHWVRQAPGQGLEWMGVMFSGGNTDYNSKFQGRVTMTRDTSTNTVYMELSSLRSEDTAVYYCARAGRYYHDSNYYWDFPYWGQGTLVTVSS

SEQ ID NO: 1557 - protein, 124 aa, synthetic construct
QVQLVQSGAEVKKPGASVKVSCKVSGGSVTSYNVHWVRQAPGQGLEWMGVMWSGGNFDYNSKFQGRVTMTRDTSTNTVYMELSSLRSEDTAVYYCARAGRYYHDSNYYWDFPYWGQGTLVTVSS

SEQ ID NO: 1558 - protein, 124 aa, synthetic construct
QVQLVQSGAEVKKPGASVKVSCKVSGFSVTSQNVHWVRQAPGQGLEWMGVMASGGNTDYNSKFQGRVTMTRDTSTNTVYMELSSLRSEDTAVYYCARAGRYYHDSNYYWDFPYWGQGTLVTVSS

SEQ ID NO: 1559 - protein, 124 aa, synthetic construct
QVQLVQSGAEVKKPGASVKVSCKVSGFSVTSGNVHWVRQAPGQGLEWMGVMWIGGNTDYNSKFQGRVTMTRDTSTNTVYMELSSLRSEDTAVYYCARAGRYYHDSNYYWDFPYWGQGTLVTVSS

SEQ ID NO: 1560 - protein, 124 aa, synthetic construct
QVQLVQSGAEVKKPGASVKVSCKVSGFSVTRYNVHWVRQAPGQGLEWMGVMWSGGNTDYNSKFQGRVTMTRDTSTNTVYMELSSLRSEDTAVYYCARAGRYYHDSNYYWDFPYWGQGTLVTVSS

SEQ ID NO: 1561 - protein, 124 aa, synthetic construct
QVQLVQSGAEVKKPGASVKVSCKVSGGSVTSYNVHWVRQAPGQGLEWMGVMWSGGSTDYNSKFQGRVTMTRDTSTNTVYMELSSLRSEDTAVYYCARAGRYYHDSNYYWDFPYWGQGTLVTVSS

SEQ ID NO: 1562 - protein, 124 aa, synthetic construct
QVQLVQSGAEVKKPGASVKVSCKVSGFPVTSYNVHWVRQAPGQGLEWMGVMWSGGNTDYNSKFQGRVTMTRDTSTNTVYMELSSLRSEDTAVYYCARAGRYYHDSNYYWDFPYWGQGTLVTVSS

SEQ ID NO: 1563 - protein, 124 aa, synthetic construct
QVQLVQSGAEVKKPGASVKVSCKVSGFSVTSRNVHWVRQAPGQGLEWMGVMWSGGRTDYNSKFQGRVTMTRDTSTNTVYMELSSLRSEDTAVYYCARAGRYYHDSNYYWDFPYWGQGTLVTVSS

SEQ ID NO: 1564 - protein, 124 aa, synthetic construct
QVQLVQSGAEVKKPGASVKVSCKVSGFSVTSYNVHWVRQAPGQGLEWMGVMWSRGNTDYNSKFQGRVTMTRDTSTNTVYMELSSLRSEDTAVYYCARAGRYYHDSNYYWDFPYWGQGTLVTVSS

SEQ ID NO: 1565 - protein, 124 aa, synthetic construct
QVQLVQSGAEVKKPGASVKVSCKVSGFGVTSYNVHWVRQAPGQGLEWMGVMWWGGNTDYNSKFQGRVTMTRDTSTNTVYMELSSLRSEDTAVYYCARAGRYYHDSNYYWDFPYWGQGTLVTVSS

SEQ ID NO: 1566 - protein, 124 aa, synthetic construct
QVQLVQSGAEVKKPGASVKVSCKVSGISVASYNVHWVRQAPGQGLEWMGVMWVGGNRDYNSKFQGRVTMTRDTSTNTVYMELSSLRSEDTAVYYCARAGRYYHDSNYYWDFPYWGQGTLVTVSS

SEQ ID NO: 1567 - protein, 124 aa, synthetic construct
QVQLVQSGAEVKKPGASVKVSCKVSGFSVTSYNVHWVRQAPGQGLEWMGVMWSGGRTDYNSKFQGRVTMTRDTSTNTVYMELSSLRSEDTAVYYCARAGRYYHDSNYYWDFPYWGQGTLVTVSS

SEQ ID NO: 1568 - protein, 124 aa, synthetic construct
QVQLVQSGAEVKKPGASVKVSCKVSGFSVTSYRVHWVRQAPGQGLEWMGVMWSGGNTDYNSKFQGRVTMTRDTSTNTVYMELSSLRSEDTAVYYCARAGRYYHDSNYYWDFPYWGQGTLVTVSS

SEQ ID NO: 1569 - protein, 124 aa, synthetic construct
QVQLVQSGAEVKKPGASVKVSCKVSGFSVTGYNVHWVRQAPGQGLEWMGVMWRGGNTDYNSKFQGRVTMTRDTSTNTVYMELSSLRSEDTAVYYCARAGRYYHDSNYYWDFPYWGQGTLVTVSS

SEQ ID NO: 1570 - protein, 124 aa, synthetic construct
QVQLVQSGAEVKKPGASVKVSCKVSGFSVQSQNVHWVRQAPGQGLEWMGVMWSGGWGDYNSKFQGRVTMTRDTSTNTVYMELSSLRSEDTAVYYCARAGRYYHDSNYGWDFPYWGQGTLVTVSS

SEQ ID NO: 1571 - protein, 124 aa, synthetic construct
QVQLVQSGAEVKKPGASVKVSCKVSGFRVTSYNVHWVRQAPGQGLEWMGVMWSGLNTDYNSKFQGRVTMTRDTSTNTVYMELSSLRSEDTAVYYCARAGRYYHDSNYYWDFPYWGQGTLVTVSS

SEQ ID NO: 1572 - protein, 124 aa, synthetic construct
QVQLVQSGAEVKKPGASVKVSCKVSGFSVTSLNVHWVRQAPGQGLEWMGVMWYGGNSDYNSKFQGRVTMTRDTSTNTVYMELSSLRSEDTAVYYCARAGRYYHDSNYYWDFPYWGQGTLVTVSS

SEQ ID NO: 1573 - protein, 124 aa, synthetic construct
QVQLVQSGAEVKKPGASVKVSCKVSGFVVTSYNVHWVRQAPGQGLEWMGVMWSGGNYDYNSKFQGRVTMTRDTSTNTVYMELSSLRSEDTAVYYCARAGRYYHDSNYYWDFPYWGQGTLVTVSS

SEQ ID NO: 1574 - protein, 124 aa, synthetic construct
QVQLVQSGAEVKKPGASVKVSCKVSGFPVTSYNVHWVRQAPGQGLEWMGVMWSGRNTDYNSKFQGRVTMTRDTSTNTVYMELSSLRSEDTAVYYCARAGRYYHDSNYYWDFPYWGQGTLVTVSS

SEQ ID NO: 1575 - protein, 124 aa, synthetic construct
QVQLVQSGAEVKKPGASVKVSCKVSGFRVTSYNVHWVRQAPGQGLEWMGVMWWGGNTDYNSKFQGRVTMTRDTSTNTVYMELSSLRSEDTAVYYCARAGRYYHDSNYYWDFPYWGQGTLVTVSS

SEQ ID NO: 1576 - protein, 124 aa, synthetic construct
QVQLVQSGAEVKKPGASVKVSCKVSGFSVVSYNVHWVRQAPGQGLEWMGVMWSGGNTLYNSKFQGRVTMTRDTSTNTVYMELSSLRSEDTAVYYCARAGRYYHDSNYYWDFPYWGQGTLVTVSS

SEQ ID NO: 1577 - protein, 124 aa, synthetic construct
QVQLVQSGAEVKKPGASVKVSCKVSGFSVMSYNVHWVRQAPGQGLEWMGVMWSGGNTLYNSKFQGRVTMTRDTSTNTVYMELSSLRSEDTAVYYCARAGRYYHDSNYYWDFPYWGQGTLVTVSS

SEQ ID NO: 1578 - protein, 124 aa, synthetic construct
QVQLVQSGAEVKKPGASVKVSCKVSGFRVTSYNVHWVRQAPGQGLEWMGVMWSGANTDYNSKFQGRVTMTRDTSTNTVYMELSSLRSEDTAVYYCARAGRYYHDSNYYWDFPYWGQGTLVTVSS

SEQ ID NO: 1579 - protein, 124 aa, synthetic construct
QVQLVQSGAEVKKPGASVKVSCKVSGFSVTSYNVHWVRQAPGQGLEWMGVMWSGGNTVYNSKFQGRVTMTRDTSTNTVYMELSSLRSEDTAVYYCARAGRYYHDSNYYWDFPYWGQGTLVTVSS

SEQ ID NO: 1580 - protein, 124 aa, synthetic construct
QVQLVQSGAEVKKPGASVKVSCKVSGFSVSSYNVHWVRQAPGQGLEWMGVMWQGGNTDYNSKFQGRVTMTRDTSTNTVYMELSSLRSEDTAVYYCARAGRYYHDSNYYWDFPYWGQGTLVTVSS

SEQ ID NO: 1581 - protein, 124 aa, synthetic construct
QVQLVQSGAEVKKPGASVKVSCKVSGFSVTTYNVHWVRQAPGQGLEWMGVMPSGGNTRYNSKFQGRVTMTRDTSTNTVYMELSSLRSEDTAVYYCARAGRYYHDSNYYWDFPYWGQGTLVTVSS

SEQ ID NO: 1582 - protein, 124 aa, synthetic construct
QVQLVQSGAEVKKPGASVKVSCKVSGFSVTSYNVHWVRQAPGQGLEWMGVMWRGGNTDYNSKFQGRVTMTRDTSTNTVYMELSSLRSEDTAVYYCARAGRYYHDSNYYWDFPYWGQGTLVTVSS

SEQ ID NO: 1583 - protein, 124 aa, synthetic construct
QVQLVQSGAEVKKPGASVKVSCKVSGFSVTMYNVHWVRQAPGQGLEWMGVMWSGGNTRYNSKFQGRVTMTRDTSTNTVYMELSSLRSEDTAVYYCARAGRYYHDSNYYWDFPYWGQGTLVTVSS

SEQ ID NO: 1584 - protein, 124 aa, synthetic construct
QVQLVQSGAEVKKPGASVKVSCKVSGFSVRSYNVHWVRQAPGQGLEWMGVMWSGLNTDYNSKFQGRVTMTRDTSTNTVYMELSSLRSEDTAVYYCARAGRYYHDSNYYWDFPYWGQGTLVTVSS

SEQ ID NO: 1585 - protein, 124 aa, synthetic construct
QVQLVQSGAEVKKPGASVKVSCKVSGFSLTSYNVHWVRQAPGQGLEWMGVMWRGGNTDYNSKFQGRVTMTRDTSTNTVYMELSSLRSEDTAVYYCARAGRYYHDSNYYWDFPYWGQGTLVTVSS

SEQ ID NO: 1586 - protein, 124 aa, synthetic construct
QVQLVQSGAEVKKPGASVKVSCKVSGFSLTSYNVHWVRQAPGQGLEWMGVMWRGGNTDYNSKFQGRVTMTRDTSTNTVYMELSSLRSEDTAVYYCARAGRYYGDSDYYWDFPYWGQGTLVTVSS

SEQ ID NO: 1587 - protein, 124 aa, synthetic construct
QVQLVQSGAEVKKPGASVKVSCKVSGFSVTSQNVHWVRQAPGQGLEWMGVMRSGGNTDYNSKFQGRVTMTRDTSTNTVYMELSSLRSEDTAVYYCARAGRYYHDSNYYWDFPYWGQGTLVTVSS

SEQ ID NO: 1588 - protein, 124 aa, synthetic construct
QVQLVQSGAEVKKPGASVKVSCKVSGFSVTSQNVHWVRQAPGQGLEWMGVMRSGGNTDYNSKFQGRVTMTRDTSTNTVYMELSSLRSEDTAVYYCARAGRYYGDSNYYWDFPYWGQGTLVTVSS

SEQ ID NO: 1589 - protein, 124 aa, synthetic construct
QVQLVQSGAEVKKPGASVKVSCKVSGFSVTSQNVHWVRQAPGQGLEWMGVMASGGNTDYNSKFQGRVTMTRDTSTNTVYMELSSLRSEDTAVYYCARAGRYYGDSNYYWDFPYWGQGTLVTVSS

SEQ ID NO: 1590 - protein, 124 aa, synthetic construct
QVQLVQSGAEVKKPGASVKVSCKVSGFSVTSQNVHWVRQAPGQGLEWMGVMASGGNTDYNSKFQGRVTMTRDTSTNTVYMELSSLRSEDTAVYYCARAGRYYGDSDYYWDFPYWGQGTLVTVSS

SEQ ID NO: 1591 - protein, 124 aa, synthetic construct
QVQLVQSGAEVKKPGASVKVSCKVSGFSVTRYNVHWVRQAPGQGLEWMGVMWSNGNTDYNSKFQGRVTMTRDTSTNTVYMELSSLRSEDTAVYYCARAGRYYHDSNYYWDFPYWGQGTLVTVSS

SEQ ID NO: 1592 - protein, 124 aa, synthetic construct
QVQLVQSGAEVKKPGASVKVSCKVSGFSVTRYNVHWVRQAPGQGLEWMGVMWSNGNTDYNSKFQGRVTMTRDTSTNTVYMELSSLRSEDTAVYYCARVGRYYHDSNYYWDFPYWGQGTLVTVSS

SEQ ID NO: 1593 - protein, 124 aa, synthetic construct
QVQLVQSGAEVKKPGASVKVSCKVSGGSVTSYNVHWVRQAPGQGLEWMGVMWSGGNTDYNSKFQGRVTMTRDTSTNTVYMELSSLRSEDTAVYYCARAGRYYHDSNYYWDFPYWGQGTLVTVSS

SEQ ID NO: 1594 - protein, 124 aa, synthetic construct
QVQLVQSGAEVKKPGASVKVSCKVSGGSVTSHNVHWVRQAPGQGLEWMGVMWSGGNTDYNSKFQGRVTMTRDTSTNTVYMELSSLRSEDTAVYYCARAGRYYHDSNYYWDFPYWGQGTLVTVSS

SEQ ID NO: 1595 - protein, 124 aa, synthetic construct
QVQLVQSGAEVKKPGASVKVSCKVSGGSVTSYNVHWVRQAPGQGLEWMGVMWVGGNTDYNSKFQGRVTMTRDTSTNTVYMELSSLRSEDTAVYYCARAGRYYHDSNYYWDFPYWGQGTLVTVSS

SEQ ID NO: 1596 - protein, 124 aa, synthetic construct
QVQLVQSGAEVKKPGASVKVSCKVSGFSVISYNVHWVRQAPGQGLEWMGVMWSKGNTDYNSKFQGRVTMTRDTSTNTVYMELSSLRSEDTAVYYCARAGRYYHDSNYYWDFPYWGQGTLVTVSS

SEQ ID NO: 1597 - protein, 124 aa, synthetic construct
QVQLVQSGAEVKKPGASVKVSCKVSGFSVLSYNVHWVRQAPGQGLEWMGVMWSRGNTDYNSKFQGRVTMTRDTSTNTVYMELSSLRSEDTAVYYCARAGRYYHDSNYYWDFPYWGQGTLVTVSS

SEQ ID NO: 1598 - protein, 124 aa, synthetic construct
QVQLVQSGAEVKKPGASVKVSCKVSGFSVISYNVHWVRQAPGQGLEWMGVMWSRGNTDYNSKFQGRVTMTRDTSTNTVYMELSSLRSEDTAVYYCARAGRYYHDSNYYWDFPYWGQGTLVTVSS

SEQ ID NO: 1599 - protein, 124 aa, synthetic construct
QVQLVQSGAEVKKPGASVKVSCKVSGFSVVSYNVHWVRQAPGQGLEWMGVMWSRGNTDYNSKFQGRVTMTRDTSTNTVYMELSSLRSEDTAVYYCARAGRYYHDSNYYWDFPYWGQGTLVTVSS

SEQ ID NO: 1600 - protein, 124 aa, synthetic construct
QVQLVQSGAEVKKPGASVKVSCKVSGFSVLSYNVHWVRQAPGQGLEWMGVMWSKGNTDYNSKFQGRVTMTRDTSTNTVYMELSSLRSEDTAVYYCARAGRYYGDSNYYWDFPYWGQGTLVTVSS

SEQ ID NO: 1601 - protein, 124 aa, synthetic construct
QVQLVQSGAEVKKPGASVKVSCKVSGFSVLSYNVHWVRQAPGQGLEWMGVMWSKGNTDYNSKFQGRVTMTRDTSTNTVYMELSSLRSEDTAVYYCARAGRYYGDSDYYWDFPYWGQGTLVTVSS

SEQ ID NO: 1602 - protein, 124 aa, synthetic construct
QVQLVQSGAEVKKPGASVKVSCKVSGFSVTSYPVHWVRQAPGQGLEWMGVMWSGGKTDYNSKFQGRVTMTRDTSTNTVYMELSSLRSEDTAVYYCARAGRYYGDSNYYWDFPYWGQGTLVTVSS

SEQ ID NO: 1603 - protein, 124 aa, synthetic construct
QVQLVQSGAEVKKPGASVKVSCKVSGFSVTSYPVHWVRQAPGQGLEWMGVMWSGGKTDYNSKFQGRVTMTRDTSTNTVYMELSSLRSEDTAVYYCARAGRYYGDSDYYWDFPYWGQGTLVTVSS

SEQ ID NO: 1604 - protein, 124 aa, synthetic construct
QVQLVQSGAEVKKPGASVKVSCKVSGFSVGSYNVHWVRQAPGQGLEWMGVMWRGGNTDYNSKFQGRVTMTRDTSTNTVYMELSSLRSEDTAVYYCARAGRYYHDSNYYWDFPYWGQGTLVTVSS

SEQ ID NO: 1605 - protein, 124 aa, synthetic construct
QVQLVQSGAEVKKPGASVKVSCKVSGFRVTSYNVHWVRQAPGQGLEWMGVMWLGGNTDYNSKFQGRVTMTRDTSTNTVYMELSSLRSEDTAVYYCARAGRYYHDSNYYWDFPYWGQGTLVTVSS

SEQ ID NO: 1606 - protein, 124 aa, synthetic construct
QVQLVQSGAEVKKPGASVKVSCKVSGFSVRSYNVHWVRQAPGQGLEWMGVMWRGGNTDYNSKFQGRVTMTRDTSTNTVYMELSSLRSEDTAVYYCARAGRYYHDSNYYWDFPYWGQGTLVTVSS

SEQ ID NO: 1607 - protein, 124 aa, synthetic construct
QVQLVQSGAEVKKPGASVKVSCKVSGFSVTAWNVHWVRQAPGQGLEWMGVMWSGPNTDYNSKFQGRVTMTRDTSTNTVYMELSSLRSEDTAVYYCARAGRYYHDSNYYWDFPYWGQGTLVTVSS

SEQ ID NO: 1608 - protein, 124 aa, synthetic construct
QVQLVQSGAEVKKPGASVKVSCKVSGFSVWSWNVHWVRQAPGQGLEWMGVMWSGGNEDYNSKFQGRVTMTRDTSTNTVYMELSSLRSEDTAVYYCARAGRYYHDSNYYWDFPYWGQGTLVTVSS

SEQ ID NO: 1609 - protein, 124 aa, synthetic construct
QVQLVQSGAEVKKPGASVKVSCKVSGFSLTMYNVHWVRQAPGQGLEWMGVMWSVGRTDYNSKFQGRVTMTRDTSTNTVYMELSSLRSEDTAVYYCARAGRYYHDSNYYWDFPYWGQGTLVTVSS

SEQ ID NO: 1610 - protein, 124 aa, synthetic construct
QVQLVQSGAEVKKPGASVKVSCKVSGFSVTSYNVHWVRQAPGQGLEWMGVMWSGGNTDYNSKFQGRVTMTRDTSTNTVYMELSSLRSEDTAVYYCARAGRYYGDSDYYWDFPYWGQGTLVTVSS

SEQ ID NO: 1611 - protein, 124 aa, synthetic construct
QVQLVQSGAEVKKPGASVKVSCKVSGFTVTSYNVHWVRQAPGQGLEWMGVMWIGGNTDYNSKFQGRVTMTRDTSTNTVYMELSSLRSEDTAVYYCARAGRYYHDSNYYWDFPYWGQGTLVTVSS

SEQ ID NO: 1612 - protein, 124 aa, synthetic construct
QVQLVQSGAEVKKPGASVKVSCKVSGFSVRSYNVHWARQAPGQGLEWMGVMWSGGNSDYNSKFQGRVTMTRDTSTNTVYMELSSLRSEDTAVYYCARAGRYYHDSNYYWDFPYWGQGTLVTVSS

SEQ ID NO: 1613 - protein, 124 aa, synthetic construct
QVQLVQSGAEVKKPGASVKVSCKVSGFMVTSYNVHWVRQAPGQGLEWMGVMWSGFNTDYNSKFQGRVTMTRDTSTNTVYMELSSLRSEDTAVYYCARAGRYYGDSDYYWDFPYWGQGTLVTVSS

SEQ ID NO: 1614 - protein, 124 aa, synthetic construct
QVQLVQSGAEVKKPGASVKVSCKVSGFSVRLYNVHWVRQAPGQGLEWMGVMWSYGNADYNSKFQGRVTMTRDTSTNTVYMELSSLRSEDTAVYYCARAGRYYHDSNYYWDFPYWGQGTLVTVSS

SEQ ID NO: 1615 - protein, 124 aa, synthetic construct
QVQLVQSGAEVKKPGASVKVSCKVSGFSHTSYNVHWVRQAPGQGLEWMGVMWSEGNTDYNSKFQGRVTMTRDTSTNTVYMELSSLRSEDTAVYYCARAGRYYHDSNYYWDFPYWGQGTLVTVSS

SEQ ID NO: 1616 - protein, 124 aa, synthetic construct
QVQLVQSGAEVKKPGASVKVSCKVSGFRVTSYNVHWVRQAPGQGLEWMGVMWMGLNTDYNSKFQGRVTMTRDTSTNTVYMELSSLRSEDTAVYYCARAGRYYHDSNYYWDFPYWGQGTLVTVSS

SEQ ID NO: 1617 - protein, 124 aa, synthetic construct
QVQLVQSGAEVKKPGASVKVSCKVSGFSVTGYLVHWVRQAPGQGLEWMGVMWRGGLTDYNSKFQGRVTMTRDTSTNTVYMELSSLRSEDTAVYYCARAGRYYHDSNYYWDFPYWGQGTLVTVSS

SEQ ID NO: 1618 - protein, 124 aa, synthetic construct
QVQLVQSGAEVKKPGASVKVSCKVSGFSVTSYNVHWVRQAPGQGLEWMGVMWSGGNPDYNSKFQGRVTMTRDTSTNTVYMELSSLRSEDTAVYYCARAGRYYHDSSYYWDFPYWGQGTLVTVSS

SEQ ID NO: 1619 - protein, 124 aa, synthetic construct
QVQLVQSGAEVKKPGASVKVSCKVSGFSVISYNVHWVRQAPGQGLEWMGVMWSGFNTDYNSKFQGRVTMTRDTSTNTVYMELSSLRSEDTAVYYCARAGRYYHDSNYYWDFPYWGQGTLVTVSS

SEQ ID NO: 1620 - protein, 124 aa, synthetic construct
QVQLVQSGAEVKKPGASVKVSCKVSGFSVTSRNVHWVRQAPGQGLEWMGVMWSYGNSDYNSKFQGRVTMTRDTSTNTVYMELSSLRSEDTAVYYCARAGRYYHDSNYYWDFPYWGQGTLVTVSS

SEQ ID NO: 1621 - protein, 124 aa, synthetic construct
QVQLVQSGAEVKKPGASVKVSCKVSGFSVTSQNVHWVRQAPGQGLEWMGVMRSGGNTDYNSKFQGRVTMTRDTSTNTVYMELSSLRSEDTAVYYCARAGRYYGDSDYYWDFPYWGQGTLVTVSS

SEQ ID NO: 1622 - protein, 124 aa, synthetic construct
QVQLVQSGAEVKKPGASVKVSCKVSGFSVTLYNVHWVRQAPGQGLEWMGVMWRGGNTDYNSKFQGRVTMTRDTSTNTVYMELSSLRSEDTAVYYCARAGRYYGDSDYYWDFPYWGQGTLVTVSS

SEQ ID NO: 1623 - protein, 124 aa, synthetic construct
QVQLVQSGAEVKKPGASVKVSCKVSGFRVTSYNVHWVRQAPGQGLEWMGVMWRGGNTDYNSKFQGRVTMTRDTSTNTVYMELSSLRSEDTAVYYCARAGRYYGDSDYYWDFPYWGQGTLVTVSS

SEQ ID NO: 1624 - protein, 124 aa, synthetic construct
QVQLVQSGAEVKKPGASVKVSCKVSGFSVTLYNVHWVRQAPGQGLEWMGVMWSGDNTDYNSKFQGRVTMTRDTFTNTVYMELSSLRSEDTAVYYCARAGRYYHDSNYYWDFPYWGQGTLVTVSS

SEQ ID NO: 1625 - protein, 124 aa, synthetic construct
QVQLVQSGAEVKKPGASVKVSCKVSGFSLTSYNVHWVRQAPGQGLEWMGVMWRGGNTDYNSKFQGRVTMTRDTSTNTVYMELSSLRSEDTAVYYCARAGRYYGDSNYYWDFPYWGQGTLVTVSS

SEQ ID NO: 1626 - protein, 124 aa, synthetic construct
QVQLVQSGAEVKKPGASVKVSCKVSGFMVTSYNVHWVRQAPGQGLEWMGVMWHGGNTDYNSKFQGRVTMTRDTSTNTVYMELSSLRSEDTAVYYCARAGRYYHDSNYYWDFPYWGQGTLVTVSS

SEQ ID NO: 1627 - protein, 124 aa, synthetic construct
QVQLVQSGAEVKKPGASVKVSCKVSGFNVTSYNVHWVRQAPGQGLEWMGVMGSGGATDYNSKFQGRVTMTRDTSTNTVYMELSSLRSEDTAVYYCARAGRYYHDSNYYWDFPYWGQGTLVTVSS

SEQ ID NO: 1628 - protein, 124 aa, synthetic construct
QVQLVQSGAEVKKPGASVKVSCKVSGFIVTSRNVHWVRQAPGQGLEWMGVMWSTGNTDYNSKFQGRVTMTRDTSTNTVYMELSSLRSEDTAVYYCARAGRYYHDSNYYWDFPYWGQGTLVTVSS

SEQ ID NO: 1629 - protein, 124 aa, synthetic construct
QVQLVQSGAEVKKPGASVKVSCKVSGGSVTSHNVHWVRQAPGQGLEWMGVMWRGGNTDYNSKFQGRVTMTRDTSTNTVYMELSSLRSEDTAVYYCARAGRYYHDSNYYWDFPYWGQGTLVTVSS

SEQ ID NO: 1630 - protein, 124 aa, synthetic construct
QVQLVQSGAEVKKPGASVKVSCKVSGGSVTSRNVHWVRQAPGQGLEWMGVMWFGGNTDYNSKFQGRVTMTRDTSTNTVYMELSSLRSEDTAVYYCARAGRYYHDSNYYWDFPYWGQGTLVTVSS

SEQ ID NO: 1631 - protein, 124 aa, synthetic construct
QVQLVQSGAEVKKPGASVKVSCKVSGGSVTSYNVHWVRQAPGQGLEWMGVMWRGGNTDYNSKFQGRVTMTRDTSTNTVYMELSSLRSEDTAVYYCARAGRYYGDSDYYWDFPYWGQGTLVTVSS

SEQ ID NO: 1632 - protein, 124 aa, synthetic construct
QVQLVQSGAEVKKPGASVKVSCKVSGGSVTSHNVHWVRQAPGQGLEWMGVMWVGGNTDYNSKFQGRVTMTRDTSTNTVYMELSSLRSEDTAVYYCARAGRYYHDSNYYWDFPYWGQGTLVTVSS

SEQ ID NO: 1633 - protein, 124 aa, synthetic construct
QVQLVQSGAEVKKPGASVKVSCKVSGRSVTGYNVHWVRQAPGQGLEWMGVMWLGENTDYNSKFQGRVTMTRDTSTNTVYMELSSLRSEDTAVYYCARAGRYYHDSNYYWDFPYWGQGTLVTVSS

SEQ ID NO: 1634 - protein, 124 aa, synthetic construct
QVQLVQSGAEVKKPGASVKVSCKVSGRSVTGYNVHWVRQAPGQGLEWMGVMWLGENTDYNSKFQGRVTMTRDTSTNTVYMELSSLRSEDTAVYYCARAGRYYVDSNYYWDFPYWGQGTLVTVSS

SEQ ID NO: 1635 - protein, 124 aa, synthetic construct
QVQLVQSGAEVKKPGASVKVSCKVSGSSVTGYNVHWVRQAPGQGLEWMGVMWVLGNTDYNSKFQGRVTMTRDTSTNTVYMELSSLRSEDTAVYYCARAGRYYHDSNYYWDFPYWGQGTLVTVSS

SEQ ID NO: 1636 - protein, 124 aa, synthetic construct
QVQLVQSGAEVKKPGASVKVSCKVSGVSVTRYNVHWVRQAPGQGLEWMGVMWTGGNTDYNSKFQGRVTMTRDTSTNTVYMELSSLRSEDTAVYYCARAGRYYHDSNYYWDFPYWGQGTLVTVSS

SEQ ID NO: 1637 - protein, 124 aa, synthetic construct
QVQLVQSGAEVKKPGASVKVSCKVSGESVTSYPVHWVRQAPGQGLEWMGVMWSGGNEDYNSKFQGRVTMTRDTSTNTVYMELSSLRSEDTAVYYCARAGRYYHDSNYYWDFPYWGQGTLVTVSS

SEQ ID NO: 1638 - protein, 124 aa, synthetic construct
QVQLVQSGAEVKKPGASVKVSCKVSGFPVTSYNVHWVRQAPGQGLEWMGVMESGGDTDYNSKFQGRVTMTRDTSTNTVYMELSSLRSEDTAVYYCARAGRYYHDSNYYWDFPYWGQGTLVTVSS

SEQ ID NO: 1639 - protein, 124 aa, synthetic construct
QVQLVQSGAEVKKPGASVKVSCKVSGFTVTSYNVHWVRQAPGQGLEWMGVMESGGNEDYNSKFQGRVTMTRDTSTNTVYMELSSLRSEDTAVYYCARAGRYYHDSNYYWDFPYWGQGTLVTVSS

SEQ ID NO: 1640 - protein, 124 aa, synthetic construct
QVQLVQSGAEVKKPGASVKVSCKVSGDSVTSYNVHWVRQAPGQGLEWMGVMWQGGNDDYNSKFQGRVTMTRDTSTNTVYMELSSLRSEDTAVYYCARAGRYYHDSNYYWDFPYWGQGTLVTVSS

SEQ ID NO: 1641 - protein, 124 aa, synthetic construct
QVQLVQSGAEVKKPGASVKVSCKVSGRSVTSENVHWVRQAPGQGLEWMGVMWMEGNTDYNSKFQGRVTMTRDTSTNTVYMELSSLRSEDTAVYYCARAGRYYHDSNYYWDFPYWGQGTLVTVSS

SEQ ID NO: 1642 - protein, 124 aa, synthetic construct
QVQLVQSGAEVKKPGASVKVSCKVSGGSVTSYNVHWVRQAPGQGLEWMGVMWSGGNEDYNSKFQGRVTMTRDTSTNTVYMELSSLRSEDTAVYYCARAGRYYGDSDYYWDFPYWGQGTLVTVSS

SEQ ID NO: 1643 - protein, 124 aa, synthetic construct
QVQLVQSGAEVKKPGASVKVSCKVSGFSVTSYNVHWVRQAPGQGLEWMGVMWSGGNTDYNSKFQGRVTMTRDTSTNTVYMELSSLRSEDTAVYYCARAGRYYDDSDYYWDFPYWGQGTLVTVSS

SEQ ID NO: 1644 - protein, 124 aa, synthetic construct
QVQLVQSGAEVKKPGASVKVSCKVSGESVTSYNVHWVRQAPGQGLEWMGVMWYGGETDYNSKFQGRVTMTRDTSTNTVYMELSSLRSEDTAVYYCARAGRYYHDSNYYWDFPYWGQGTLVTVSS

SEQ ID NO: 1645 - protein, 124 aa, synthetic construct
QVQLVQSGAEVKKPGASVKVSCKVSGFSVTEYNVHWVRQAPGQGLEWMGVMWIGGDTDYNSKFQGRVTMTRDTSTNTVYMELSSLRSEDTAVYYCARAGRYYHDSNYYWDFPYWGQGTLVTVSS

SEQ ID NO: 1646 - protein, 124 aa, synthetic construct
QVQLVQSGAEVKKPGASVKVSCKVSGSSVSSYNVHWVRQAPGQGLEWMGVMWSGENDDYNSKFQGRVTMTRDTSTNTVYMELSSLRSEDTAVYYCARAGRYYHDSNYYWDFPYWGQGTLVTVSS

SEQ ID NO: 1647 - protein, 124 aa, synthetic construct
QVQLVQSGAEVKKPGASVKVSCKVSGESVGSYNVHWVRQAPGQGLEWMGVMPSGGNEDYNSKFQGRVTMTRDTSTNTVYMELSSLRSEDTAVYYCARAGRYYHDSNYYWDFPYWGQGTLVTVSS

SEQ ID NO: 1648 - protein, 124 aa, synthetic construct
QVQLVQSGAEVKKPGASVKVSCKVSGFSVETYNVHWVRQAPGQGLEWMGVMESVGNTDYNSKFQGRVTMTRDTSTNTVYMELSSLRSEDTAVYYCARAGRYYHDSNYYWDFPYWGQGTLVTVSS

SEQ ID NO: 1649 - protein, 124 aa, synthetic construct
QVQLVQSGAEVKKPGASVKVSCKVSGFDNTSYNVHWVRQAPGQGLEWMGVMLSGGNEDYNSKFQGRVTMTRDTSTNTVYMELSSLRSEDTAVYYCARAGRYYHDSNYYWDFPYWGQGTLVTVSS

SEQ ID NO: 1650 - protein, 124 aa, synthetic construct
QVQLVQSGAEVKKPGASVKVSCKVSGESVTSENVHWVRQAPGQGLEWMGVMWSGGHSDYNSKFQGRVTMTRDTSTNTVYMELSSLRSEDTAVYYCARAGRYYHDSNYYWDFPYWGQGTLVTVSS

SEQ ID NO: 1651 - protein, 124 aa, synthetic construct
QVQLVQSGAEVKKPGASVKVSCKVSGFSVTLENVHWVRQAPGQGLEWMGVMEFGGNTDYNSKFQGRVTMTRDTSTNTVYMELSSLRSEDTAVYYCARAGRYYHDSNYYWDFPYWGQGTLVTVSS

SEQ ID NO: 1652 - protein, 124 aa, synthetic construct
QVQLVQSGAEVKKPGASVKVSCKVSGESVTSVNVHWVRQAPGQGLEWMGVMWFGENTDYNSKFQGRVTMTRDTSTNTVYMELSSLRSEDTAVYYCARAGRYYHDSNYYWDFPYWGQGTLVTVSS

SEQ ID NO: 1653 - protein, 124 aa, synthetic construct
QVQLVQSGAEVKKPGASVKVSCKVSGFSVTSYNVHWVRQAPGQGLEWMGVMWIGGNTDYNSKFQGRVTMTRDTSTNTVYMELSSLRSEDTAVYYCARAGRYYHDSNYYWDFPYWGQGTLVTVSS

SEQ ID NO: 1654 - protein, 124 aa, synthetic construct
QVQLVQSGAEVKKPGASVKVSCKVSGFSVISYNVHWVRQAPGQGLEWMGVMWSGGNTDYNSKFQGRVTMTRDTSTNTVYMELSSLRSEDTAVYYCARAGRYYHDSNYYWDFPYWGQGTLVTVSS

SEQ ID NO: 1655 - protein, 124 aa, synthetic construct
QVQLVQSGAEVKKPGASVKVSCKVSGFSVTSYNVHWVRQAPGQGLEWMGVMWFGGNTDYNSKFQGRVTMTRDTSTNTVYMELSSLRSEDTAVYYCARAGRYYHDSNYYWDFPYWGQGTLVTVSS

SEQ ID NO: 1656 - protein, 124 aa, synthetic construct
QVQLVQSGAEVKKPGASVKVSCKVSGFSVDSYNVHWVRQAPGQGLEWMGVMWSGGNPDYNSKFQGRVTMTRDTSTNTVYMELSSLRSEDTAVYYCARAGRYYHDSNYYWDFPYWGQGTLVTVSS

SEQ ID NO: 1657 - protein, 124 aa, synthetic construct
QVQLVQSGAEVKKPGASVKVSCKVSGFPVTSYNVHWVRQAPGQGLEWMGVMWSGGNDDYNSKFQGRVTMTRDTSTNTVYMELSSLRSEDTAVYYCARAGRYYHDSNYYWDFPYWGQGTLVTVSS

SEQ ID NO: 1658 - protein, 124 aa, synthetic construct
QVQLVQSGAEVKKPGASVKVSCKVSGHSVTSYNVHWVRQAPGQGLEWMGVMWSGFNTDYNSKFQGRVTMTRDTSTNTVYMELSSLRSEDTAVYYCARAGRYYHDSNYYWDFPYWGQGTLVTVSS

SEQ ID NO: 1659 - protein, 124 aa, synthetic construct
QVQLVQSGAEVKKPGASVKVSCKVSGFSVDSYNVHWVRQAPGQGLEWMGVMWIGGNTDYNSKFQGRVTMTRDTSTNTVYMELSSLRSEDTAVYYCARAGRYYHDSNYYWDFPYWGQGTLVTVSS

SEQ ID NO: 1660 - protein, 124 aa, synthetic construct
QVQLVQSGAEVKKPGASVKVSCKVSGRSVTSYNVHWVRQAPGQGLEWMGVMWYGGNTDYNSKFQGRVTMTRDTSTNTVYMELSSLRSEDTAVYYCARAGRYYHDSNYYWDFPYWGQGTLVTVSS

SEQ ID NO: 1661 - protein, 124 aa, synthetic construct
QVQLVQSGAEVKKPGASVKVSCKVSGFPVTSYNVHWVRQAPGQGLEWMGVMWYGGNTDYNSKFQGRVTMTRDTSTNTVYMELSSLRSEDTAVYYCARAGRYYHDSNYYWDFPYWGQGTLVTVSS

SEQ ID NO: 1662 - protein, 124 aa, synthetic construct
QVQLVQSGAEVKKPGASVKVSCKVSGFSVSSYNVHWVRQAPGQGLEWMGVMWIGGNTDYNSKFQGRVTMTRDTSTNTVYMELSSLRSEDTAVYYCARAGRYYHDSNYYWDFPYWGQGTLVTVSS

SEQ ID NO: 1663 - protein, 124 aa, synthetic construct
QVQLVQSGAEVKKPGASVKVSCKVSGGSVTSYNVHWVRQAPGQGLEWMGVMWFGGNTDYNSKFQGRVTMTRDTSTNTVYMELSSLRSEDTAVYYCARAGRYYHDSNYYWDFPYWGQGTLVTVSS

SEQ ID NO: 1664 - protein, 124 aa, synthetic construct
QVQLVQSGAEVKKPGASVKVSCKVSGFSVTSYNVHWVRQAPGQGLEWMGVMWSGGNTDYNSKFQGRVTMTRDTSTNTVYMELSSLRSEDTAVYYCARAGRYYGDSNYYWDFPYWGQGTLVTVSS

SEQ ID NO: 1665 - protein, 124 aa, synthetic construct
QVQLVQSGAEVKKPGASVKVSCKVSGFSVTSYNVHWVRQAPGQGLEWMGVMWSGGNTDYNSKFQGRVTMTRDTSTNTVYMELSSLRSEDTAVYYCARAGRYYVDSNYYWDFPYWGQGTLVTVSS

SEQ ID NO: 1666 - protein, 124 aa, synthetic construct
QVQLVQSGAEVKKPGASVKVSCKVSGFSVISYNVHWVRQAPGQGLEWMGVMWSGGNTDYNSKFQGRVTMTRDTSTNTVYMELSSLRSEDTAVYYCARVGRYYHDSNYYWDFPYWGQGTLVTVSS

SEQ ID NO: 1667 - protein, 124 aa, synthetic construct
QVQLVQSGAEVKKPGASVKVSCKVSGFSVISYNVHWVRQAPGQGLEWMGVMWSGGNTDYNSKFQGRVTMTRDTSTNTVYMELSSLRSEDTAVYYCARAGRYYHESNYYWDFPYWGQGTLVTVSS

SEQ ID NO: 1668 - protein, 124 aa, synthetic construct
QVQLVQSGAEVKKPGASVKVSCKVSGFSVTSYNVHWVRQAPGQGLEWMGVMWFGGNTDYNSKFQGRVTMTRDTSTNTVYMELSSLRSEDTAVYYCARAGRYYHDVNYYWDFPYWGQGTLVTVSS

SEQ ID NO: 1669 - protein, 124 aa, synthetic construct
QVQLVQSGAEVKKPGASVKVSCKVSGFSVTSYNVHWVRQAPGQGLEWMGVMWKGGNTDYNSKFQGRVTMTRDTSTNTVYMELSSLRSEDTAVYYCARAGRYYGDSNYYWDFPYWGQGTLVTVSS

SEQ ID NO: 1670 - protein, 124 aa, synthetic construct
QVQLVQSGAEVKKPGASVKVSCKVSGFSVTSYNVHWVRQAPGQGLEWMGVMWYGGNTDYNSKFQGRVTMTRDTSTNTVYMELSSLRSEDTAVYYCARIGRYYHDSNYYWDFPYWGQGTLVTVSS

SEQ ID NO: 1671 - protein, 124 aa, synthetic construct
QVQLVQSGAEVKKPGASVKVSCKVSGFSVTSYNVHWVRQAPGQGLEWMGVMWFGGNTDYNSKFQGRVTMTRDTSTNTVYMELSSLRSEDTAVYYCARAGRYYHDSNFYWDFPYWGQGTLVTVSS

SEQ ID NO: 1672 - protein, 124 aa, synthetic construct
QVQLVQSGAEVKKPGASVKVSCKVSGFSVTSYNVHWVRQAPGQGLEWMGVMWSGGYTDYNSKFQGRVTMTRDTSTNTVYMELSSLRSEDTAVYYCARAGRYYHDENYYWDFPYWGQGTLVTVSS

SEQ ID NO: 1673 - protein, 124 aa, synthetic construct
QVQLVQSGAEVKKPGASVKVSCKVSGFSVTSYNVHWVRQAPGQGLEWMGVMWSGVNTDYNSKFQGRVTMTRDTSTNTVYMELSSLRSEDTAVYYCARAGRYYHDSEYYWDFPYWGQGTLVTVSS

SEQ ID NO: 1674 - protein, 124 aa, synthetic construct
QVQLVQSGAEVKKPGASVKVSCKVSGFSVTSYNVHWVRQAPGQGLEWMGVMWYGGNTDYNSKFQGRVTMTRDTSTNTVYMELSSLRSEDTAVYYCARAGRYYVDSNYYWDFPYWGQGTLVTVSS

SEQ ID NO: 1675 - protein, 124 aa, synthetic construct
QVQLVQSGAEVKKPGASVKVSCKVSGGSVTSYNVHWVRQAPGQGLEWMGVMWSNGNTDYNSKFQGRVTMTRDTSTNTVYMELSSLRSEDTAVYYCARVGRYYHDSNYYWDFPYWGQGTLVTVSS

SEQ ID NO: 1676 - protein, 124 aa, synthetic construct
QVQLVQSGAEVKKPGASVKVSCKVSGFSVTRYNVHWVRQAPGQGLEWMGVMWSNGNTDYNSKFQGRVTMTRDTSTNTVYMELSSLRSEDTAVYYCARAGRYYGDSNYYWDFPYWGQGTLVTVSS

SEQ ID NO: 1677 - protein, 124 aa, synthetic construct
QVQLVQSGAEVKKPGASVKVSCKVSGFVVTSYNVHWVRQAPGQGLEWMGVMWSNGNTDYNSKFQGRVTMTRDTSTNTVYMELSSLRSEDTAVYYCARVGRYYHDSNYYWDFPYWGQGTLVTVSS

SEQ ID NO: 1678 - protein, 124 aa, synthetic construct
QVQLVQSGAEVKKPGASVKVSCKVSGFGVTSYNVHWVRQAPGQGLEWMGVMWHGGNTDYNSKFQGRVTMTRDTSTNTVYMELSSLRSEDTAVYYCARAGRYYHDDNYYWDFPYWGQGTLVTVSS

SEQ ID NO: 1679 - protein, 124 aa, synthetic construct
QVQLVQSGAEVKKPGASVKVSCKVSGFSVVSYNVHWVRQAPGQGLEWMGVMWYGGNTDYNSKFQGRVTMTRDTSTNTVYMELSSLRSEDTAVYYCARAGRYYHESNYYWDFPYWGQGTLVTVSS

SEQ ID NO: 1680 - protein, 124 aa, synthetic construct
QVQLVQSGAEVKKPGASVKVSCKVSGFSVTSFNVHWVRQAPGQGLEWMGVMWFGGNTDYNSKFQGRVTMTRDTSTNTVYMELSSLRSEDTAVYYCARAGRYYHDSEYYWDFPYWGQGTLVTVSS

SEQ ID NO: 1681 - protein, 124 aa, synthetic construct
QVQLVQSGAEVKKPGASVKVSCKVSGFSVTSYNVHWVRQAPGQGLEWMGVMWHGINTDYNSKFQGRVTMTRDTSTNTVYMELSSLRSEDTAVYYCARAGRYYHDSNYYWDFPYWGQGTLVTVSS

SEQ ID NO: 1682 - protein, 124 aa, synthetic construct
QVQLVQSGAEVKKPGASVKVSCKVSGFSVTSYNVHWVRQAPGQGLEWMGVMWHGGNDDYNSKFQGRVTMTRDTSTNTVYMELSSLRSEDTAVYYCARAGRYYHDSNYYWDFPYWGQGTLVTVSS

SEQ ID NO: 1683 - protein, 124 aa, synthetic construct
QVQLVQSGAEVKKPGASVKVSCKVSGFSVTSYNVHWVRQAPGQGLEWMGVMWSGNNTGYNSKFQGRVTMTRDTSTNTVYMELSSLRSEDTAVYYCARAGRYYHDSNYYWDFPYWGQGTLVTVSS

SEQ ID NO: 1684 - protein, 124 aa, synthetic construct
QVQLVQSGAEVKKPGASVKVSCKVSGFSVTSYNVHWVRQAPGQGLEWMGVMWYGGNKDYNSKFQGRVTMTRDTSTNTVYMELSSLRSEDTAVYYCARAGRYYHDSNYYWDFPYWGQGTLVTVSS

SEQ ID NO: 1685 - protein, 124 aa, synthetic construct
QVQLVQSGAEVKKPGASVKVSCKVSGFSVTSYNVHWVRQAPGQGLEWMGVMWFGGNHDYNSKFQGRVTMTRDTSTNTVYMELSSLRSEDTAVYYCARAGRYYHDSNYYWDFPYWGQGTLVTVSS

SEQ ID NO: 1686 - protein, 124 aa, synthetic construct
QVQLVQSGAEVKKPGASVKVSCKVSGFSVTSYNVHWVRQAPGQGLEWMGVMWHIGNTDYNSKFQGRVTMTRDTSTNTVYMELSSLRSEDTAVYYCARAGRYYHDSNYYWDFPYWGQGTLVTVSS

SEQ ID NO: 1687 - protein, 124 aa, synthetic construct
QVQLVQSGAEVKKPGASVKVSCKVSGFSVHSHNVHWVRQAPGQGLEWMGVMWSGGNTDYNSKFQGRVTMTRDTSTNTVYMELSSLRSEDTAVYYCARAGRYYHDSNYYWDFPYWGQGTLVTVSS

SEQ ID NO: 1688 - protein, 124 aa, synthetic construct
QVQLVQSGAEVKKPGASVKVSCKVSGFSVTSYNVHWVRQAPGQGLEWMGVMWFGGNDDYNSKFQGRVTMTRDTSTNTVYMELSSLRSEDTAVYYCARAGRYYHDSNYYWDFPYWGQGTLVTVSS

SEQ ID NO: 1689 - protein, 124 aa, synthetic construct
QVQLVQSGAEVKKPGASVKVSCKVSGFSVTSYNVHWVRQAPGQGLEWMGVMWIGNNTDYNSKFQGRVTMTRDTSTNTVYMELSSLRSEDTAVYYCARAGRYYHDSNYYWDFPYWGQGTLVTVSS

SEQ ID NO: 1690 - protein, 124 aa, synthetic construct
QVQLVQSGAEVKKPGASVKVSCKVSGFSVTSYNVHWVRQAPGQGLEWMGVMWYGGNIDYNSKFQGRVTMTRDTSTNTVYMELSSLRSEDTAVYYCARAGRYYHDSNYYWDFPYWGQGTLVTVSS

SEQ ID NO: 1691 - protein, 124 aa, synthetic construct
QVQLVQSGAEVKKPGASVKVSCKVSGFSVTSINVHWVRQAPGQGLEWMGVMWSGKFTDYNSKFQGRVTMTRDTSTNTVYMELSSLRSEDTAVYYCARAGRYYHDSNYYWDFPYWGQGTLVTVSS

SEQ ID NO: 1692 - protein, 124 aa, synthetic construct
QVQLVQSGAEVKKPGASVKVSCKVSGFVVTSYNVHWVRQAPGQGLEWMGVMWKGGNEDYNSKFQGRVTMTRDTSTNTVYMELSSLRSEDTAVYYCARAGRYYHDSNYYWDFPYWGQGTLVTVSS

SEQ ID NO: 1693 - protein, 124 aa, synthetic construct
QVQLVQSGAEVKKPGASVKVSCKVSGGSVTSHNVHWVRQAPGQGLEWMGVMWSGFNTDYNSKFQGRVTMTRDTSTNTVYMELSSLRSEDTAVYYCARAGRYYHDSNYYWDFPYWGQGTLVTVSS

SEQ ID NO: 1694 - protein, 124 aa, synthetic construct
QVQLVQSGAEVKKPGASVKVSCKVSGKSVTSNNVHWVRQAPGQGLEWMGVMWFGGNTDYNSKFQGRVTMTRDTSTNTVYMELSSLRSEDTAVYYCARAGRYYHDSNYYWDFPYWGQGTLVTVSS

SEQ ID NO: 1695 - protein, 124 aa, synthetic construct
QVQLVQSGAEVKKPGASVKVSCKVSGFSVTSQNVHWVRQAPGQGLEWMGVMWNGGGTDYNSKFQGRVTMTRDTSTNTVYMELSSLRSEDTAVYYCARAGRYYHDSNYYWDFPYWGQGTLVTVSS

SEQ ID NO: 1696 - protein, 124 aa, synthetic construct
QVQLVQSGAEVKKPGASVKVSCKVSGFYVTSYNVHWVRQAPGQGLEWMGVMWSGGNREYNSKFQGRVTMTRDTSTNTVYMELSSLRSEDTAVYYCARAGRYYHDSNYYWDFPYWGQGTLVTVSS

SEQ ID NO: 1697 - protein, 124 aa, synthetic construct
QVQLVQSGAEVKKPGASVKVSCKVSGFWVTTYNVHWVRQAPGQGLEWMGVMKSGENTDYNSKFQGRVTMTRDTSTNTVYMELSSLRSEDTAVYYCARAGRYYHDSNYYWDFPYWGQGTLVTVSS

SEQ ID NO: 1698 - protein, 124 aa, synthetic construct
QVQLVQSGAEVKKPGASVKVSCKVSGWSVTSQNVHWVRQAPGQGLEWMGVMVSYGNTDYNSKFQGRVTMTRDTSTNTVYMELSSLRSEDTAVYYCARAGRYYHDSNYYWDFPYWGQGTLVTVSS

SEQ ID NO: 1699 - protein, 124 aa, synthetic construct
QVQLVQSGAEVKKPGASVKVSCKVSGFSVGSQNVHWVRQAPGQGLEWMGVMWSGYNTGYNSKFQGRVTMTRDTSTNTVYMELSSLRSEDTAVYYCARAGRYYHDSNYYWDFPYWGQGTLVTVSS

SEQ ID NO: 1700 - protein, 124 aa, synthetic construct
QVQLVQSGAEVKKPGASVKVSCKVSGGSVTSHNVHWVRQAPGQGLEWMGVMWSGGNTDYNSKFQGRVTMTRDTSTNTVYMELSSLRSEDTAVYYCARAGRYYHDSSYYWDFPYWGQGTLVTVSS

SEQ ID NO: 1701 - protein, 124 aa, synthetic construct
QVQLVQSGAEVKKPGASVKVSCKVSGGSVTSHNVHWVRQAPGQGLEWMGVMWSGGNTDYNSKFQGRVTMTRDTSTNTVYMELSSLRSEDTAVYYCARAGRYYHDSLYYWDFPYWGQGTLVTVSS

SEQ ID NO: 1702 - protein, 124 aa, synthetic construct
QVQLVQSGAEVKKPGASVKVSCKVSGGSVTSHNVHWVRQAPGQGLEWMGVMWSGGNTDYNSKFQGRVTMTRDTSTNTVYMELSSLRSEDTAVYYCARAGRYYVDSNYYWDFPYWGQGTLVTVSS

SEQ ID NO: 1703 - protein, 124 aa, synthetic construct
QVQLVQSGAEVKKPGASVKVSCKVSGLSVVSYNVHWVRQAPGQGLEWMGVMWSGGNTDYNSKFQGRVTMTRDTSTNTVYMELSSLRSEDTAVYYCARAGRYYHDVNYYWDFPYWGQGTLVTVSS

SEQ ID NO: 1704 - protein, 124 aa, synthetic construct
QVQLVQSGAEVKKPGASVKVSCKVSGFSVTSYNVHWVRQAPGQGLEWMGVMWVGLNTDYNSKFQGRVTMTRDTSTNTVYMELSSLRSEDTAVYYCARAGRYYHDENYYWDFPYWGQGTLVTVSS

SEQ ID NO: 1705 - protein, 124 aa, synthetic construct
QVQLVQSGAEVKKPGASVKVSCKVSGFSVTSYNVHWVRQAPGQGLEWMGVMWFGGNVDYNSKFQGRVTMTRDTSTNTVYMELSSLRSEDTAVYYCARAQRYYHDSNYYWDFPYWGQGTLVTVSS

SEQ ID NO: 1706 - protein, 124 aa, synthetic construct
QVQLVQSGAEVKKPGASVKVSCKVSGVSVRSYNVHWVRQAPGQGLEWMGVMWSGGTTDYNSKFQGRVTMTRDTSTNTVYMELSSLRSEDTAVYYCARAGRYYHDENYYWDFPYWGQGTLVTVSS

SEQ ID NO: 1707 - protein, 124 aa, synthetic construct
QVQLVQSGAEVKKPGASVKVSCKVSGFSTTSYNVHWVRQAPGQGLEWMGVMWHGGNADYNSKFQGRVTMTRDTSTNTVYMELSSLRSEDTAVYYCARAGRYYGDSNYYWDFPYWGQGTLVTVSS

SEQ ID NO: 1708 - protein, 124 aa, synthetic construct
QVQLVQSGAEVKKPGASVKVSCKVSGFSVARYNVHWVRQAPGQGLEWMGVMWSGGGTDYNSKFQGRVTMTRDTSTNTVYMELSSLRSEDTAVYYCARAGRYYHDANYYWDFPYWGQGTLVTVSS

SEQ ID NO: 1709 - protein, 124 aa, synthetic construct
QVQLVQSGAEVKKPGASVKVSCKVSGGSVTAYNVHWVRQAPGQGLEWMGVMWRGGNTDYNSKFQGRVTMTRDTSTNTVYMELSSLRSEDTAVYYCARAGRYYHDSNYGWDFPYWGQGTLVTVSS

SEQ ID NO: 1710 - protein, 124 aa, synthetic construct
QVQLVQSGAEVKKPGASVKVSCKVSGFSVGSQNVHWVRQAPGQGLEWMGVMWSGYNTGYNSKFQGRVTMTRDTSTNTVYMELSSLRSEDTAVYYCARAGRYYHDSGYYWDFPYWGQGTLVTVSS

SEQ ID NO: 1711 - protein, 124 aa, synthetic construct
QVQLVQSGAEVKKPGASVKVSCKVSGFSVTSYNVHWVRQAPGQGLEWMGVMWSGGNTDYNSKFQGRVTMTRDTSTNTVYMELSSLRSEDTAVYYCARAGRYYHGSEYYWDFPYWGQGTLVTVSS

SEQ ID NO: 1712 - protein, 124 aa, synthetic construct
QVQLVQSGAEVKKPGASVKVSCKVSGFSVTSYNVHWVRQAPGQGLEWMGVMWSGGNTDYNSKFQGRVTMTRDTSTNTVYMELSSLRSEDTAVYYCARTGRYYHDSIYYWDFPYWGQGTLVTVSS

SEQ ID NO: 1713 - protein, 124 aa, synthetic construct
QVQLVQSGAEVKKPGASVKVSCKVSGFSVTSYNVHWVRQAPGQGLEWMGVMWSGGNTDYNSKFQGRVTMTRDTSTNTVYMELSSLRSEDTAVYYCARTGRYYHDSYYYWDFPYWGQGTLVTVSS

SEQ ID NO: 1714 - protein, 124 aa, synthetic construct
QVQLVQSGAEVKKPGASVKVSCKVSGFSVTSYNVHWVRQAPGQGLEWMGVMWSGGNTDYNSKFQGRVTMTRDTSTNTVYMELSSLRSEDTAVYYCARAGRYYADSDYYWDFPYWGQGTLVTVSS

SEQ ID NO: 1715 - protein, 124 aa, synthetic construct
QVQLVQSGAEVKKPGASVKVSCKVSGFSVTSYNVHWVRQAPGQGLEWMGVMWSGGNTDYNSKFQGRVTMTRDTSTNTVYMELSSLRSEDTAVYYCARPGRYYHDINYYWDFPYWGQGTLVTVSS

SEQ ID NO: 1716 - protein, 124 aa, synthetic construct
QVQLVQSGAEVKKPGASVKVSCKVSGFSVTSYNVHWVRQAPGQGLEWMGVMWSGGNTDYNSKFQGRVTMTRDTSTNTVYMELSSLRSEDTAVYYCARAGRYYIDANYYWDFPYWGQGTLVTVSS

SEQ ID NO: 1717 - protein, 124 aa, synthetic construct
QVQLVQSGAEVKKPGASVKVSCKVSGFSVTSYNVHWVRQAPGQGLEWMGVMWSGGNTDYNSKFQGRVTMTRDTSTNTVYMELSSLRSEDTAVYYCARAGRYYGESNYYWDFPYWGQGTLVTVSS

SEQ ID NO: 1718 - protein, 124 aa, synthetic construct
QVQLVQSGAEVKKPGASVKVSCKVSGFSVTSYNVHWVRQAPGQGLEWMGVMWSGGNTDYNSKFQGRVTMTRDTSTNTVYMELSSLRSEDTAVYYCARAGRYYHDVRYYWDFPYWGQGTLVTVSS

SEQ ID NO: 1719 - protein, 124 aa, synthetic construct
QVQLVQSGAEVKKPGASVKVSCKVSGFSVTSYNVHWVRQAPGQGLEWMGVMWSGGNTDYNSKFQGRVTMTRDTSTNTVYMELSSLRSEDTAVYYCARAGRYYHGSNYAWDFPYWGQGTLVTVSS

SEQ ID NO: 1720 - protein, 124 aa, synthetic construct
QVQLVQSGAEVKKPGASVKVSCKVSGFSVTSYNVHWVRQAPGQGLEWMGVMWFGGNTDYNSKFQGRVTMTRDTSTNTVYMELSSLRSEDTAVYYCARAGRYYGDSDYYWDFPYWGQGTLVTVSS

SEQ ID NO: 1721 - protein, 124 aa, synthetic construct
QVQLVQSGAEVKKPGASVKVSCKVSGFSLTSYNVHWVRQAPGQGLEWMGVMWSGGNTDYNSKFQGRVTMTRDTSTNTVYMELSSLRSEDTAVYYCARAGRYYGDSDYYWDFPYWGQGTLVTVSS

SEQ ID NO: 1722 - protein, 124 aa, synthetic construct
QVQLVQSGAEVKKPGASVKVSCKVSGFSVTRYNVHWVRQAPGQGLEWMGVMWSGGNTDYNSKFQGRVTMTRDTSTNTVYMELSSLRSEDTAVYYCARAGRYYGDSDYYWDFPYWGQGTLVTVSS

SEQ ID NO: 1723 - protein, 124 aa, synthetic construct
QVQLVQSGAEVKKPGASVKVSCKVSGFSVRSYNVHWVRQAPGQGLEWMGVMWSGGNTDYNSKFQGRVTMTRDTSTNTVYMELSSLRSEDTAVYYCARAGRYYGDSDYYWDFPYWGQGTLVTVSS

SEQ ID NO: 1724 - protein, 124 aa, synthetic construct
QVQLVQSGAEVKKPGASVKVSCKVSGFSVTLYNVHWVRQAPGQGLEWMGVMWSGGNTDYNSKFQGRVTMTRDTSTNTVYMELSSLRSEDTAVYYCARAGRYYGDSDYYWDFPYWGQGTLVTVSS

SEQ ID NO: 1725 - protein, 124 aa, synthetic construct
QVQLVQSGAEVKKPGASVKVSCKVSGFSVTSYNVHWVRQAPGQGLEWMGVMWLGGNTDYNSKFQGRVTMTRDTSTNTVYMELSSLRSEDTAVYYCARGGRYYHQSNYYWDFPYWGQGTLVTVSS

SEQ ID NO: 1726 - protein, 124 aa, synthetic construct
QVQLVQSGAEVKKPGASVKVSCKVSGFSVTSYNVHWVRQAPGQGLEWMGVMWSGLNTDYNSKFQGRVTMTRDTSTNTVYMELSSLRSEDTAVYYCARLGRYYHDSAYYWDFPYWGQGTLVTVSS

SEQ ID NO: 1727 - protein, 124 aa, synthetic construct
QVQLVQSGAEVKKPGASVKVSCKVSGFSVTSYNVHWVRQAPGQGLEWMGVMWFGGNTDYNSKFQGRVTMTRDTSTNTVYMELSSLRSEDTAVYYCARAGRYYGDRNYYWDFPYWGQGTLVTVSS

SEQ ID NO: 1728 - protein, 124 aa, synthetic construct
QVQLVQSGAEVKKPGASVKVSCKVSGFSVTSYLVHWVRQAPGQGLEWMGVMWSGGNTDYNSKFQGRVTMTRDTSTNTVYMELSSLRSEDTAVYYCARAGRYYSDSNYFWDFPYWGQGTLVTVSS

SEQ ID NO: 1729 - protein, 124 aa, synthetic construct
QVQLVQSGAEVKKPGASVKVSCKVSGISVTSYNVHWVRQAPGQGLEWMGVMWSGGNTDYNSKFQGRVTMTRDTSTNTVYMELSSLRSEDTAVYYCARAGRYYVDSRYYWDFPYWGQGTLVTVSS

SEQ ID NO: 1730 - protein, 124 aa, synthetic construct
QVQLVQSGAEVKKPGASVKVSCKVSGFSVTSENVHWVRQAPGQGLEWMGVMWSGGNTGYNSKFQGRVTMTRDTSTNTVYMELSSLRSEDTAVYYCARVGRYYHASNYYWDFPYWGQGTLVTVSS

SEQ ID NO: 1731 - protein, 124 aa, synthetic construct
QVQLVQSGAEVKKPGASVKVSCKVSGFSVSSYNVHWVRQAPGQGLEWMGVMWVGGNTDYNSKFQGRVTMTRDTSTNTVYMELSSLRSEDTAVYYCARGGRYYHDRNYYWDFPYWGQGTLVTVSS

SEQ ID NO: 1732 - protein, 124 aa, synthetic construct
QVQLVQSGAEVKKPGASVKVSCKVSGFHVTSYNVHWVRQAPGQGLEWMGVMWSGSGTDYNSKFQGRVTMTRDTSTNTVYMELSSLRSEDTAVYYCARPGRYYHDTNYYWDFPYWGQGTLVTVSS

SEQ ID NO: 1733 - protein, 124 aa, synthetic construct
QVQLVQSGAEVKKPGASVKVSCKVSGFSVASYNVHWVRQAPGQGLEWMGVMWSGTNPDYNSKFQGRVTMTRDTSTNTVYMELSSLRSEDTAVYYCARSGRYYHDSVYYWDFPYWGQGTLVTVSS

SEQ ID NO: 1734 - protein, 124 aa, synthetic construct
QVQLVQSGAEVKKPGASVKVSCKVSGFQVESYNVHWVRQAPGQGLEWMGVMWSTINTDYNSKFQGRVTMTRDTSTNTVYMELSSLRSEDTAVYYCARSGRYYVDSNYYWDFPYWGQGTLVTVSS

SEQ ID NO: 1735 - protein, 124 aa, synthetic construct
QVQLVQSGAEVKKPGASVKVSCKVSGFAVTNYNVHWVRQAPGQGLEWMGVMKSPGNTDYNSKFQGRVTMTRDTSTNTVYMELSSLRSEDTAVYYCARAGRYYIDSNYWWDFPYWGQGTLVTVSS

SEQ ID NO: 1736 - protein, 124 aa, synthetic construct
QVQLVQSGAEVKKPGASVKVSCKVSGFSVTSRNVHWVRQAPGQGLEWMGVMWSVGNTDYNSKFQGRVTMTRDTSTNTVYMELSSLRSEDTAVYYCARSGRYYHESNYYWDFPYWGQGTLVTVSS

SEQ ID NO: 1737 - protein, 124 aa, synthetic construct
QVQLVQSGAEVKKPGASVKVSCKVSGFRVTSYNVHWVRQAPGQGLEWMGVMWSNGNTDYNSKFQGRVTMTRDTSTNTVYMELSSLRSEDTAVYYCARVGRYYHDSNYYWDFPYWGQGTLVTVSS

SEQ ID NO: 1738 - protein, 124 aa, synthetic construct
QVQLVQSGAEVKKPGASVKVSCKVSGFSVTKYNVHWVRQAPGQGLEWMGVMWYGGNTDYNSKFQGRVTMTRDTSTNTVYMELSSLRSEDTAVYYCARAGRYYHDSNYYWDFPYWGQGTLVTVSS

SEQ ID NO: 1739 - protein, 124 aa, synthetic construct
QVQLVQSGAEVKKPGASVKVSCKVSGFSVTSYNVHWVRQAPGQGLEWMGVMWLGGGTDYNSKFQGRVTMTRDTSTNTVYMELSSLRSEDTAVYYCARAGRYYVDSNYYWDFPYWGQGTLVTVSS

SEQ ID NO: 1740 - protein, 124 aa, synthetic construct
QVQLVQSGAEVKKPGASVKVSCKVSGFVVRSYNVHWVRQAPGQGLEWMGVMWNGGNQDYNSKFQGRVTMTRDTSTNTVYMELSSLRSEDTAVYYCARAGRYYGDSNYYWDFPYWGQGTLVTVSS

SEQ ID NO: 1741 - protein, 124 aa, synthetic construct
QVQLVQSGAEVKKPGASVKVSCKVSGFSVTSLNVHWVRQAPGQGLEWMGVMWTGGNEDYNSKFQGRVTMTRDTSTNTVYMELSSLRSEDTAVYYCARQGRYYVDSNYYWDFPYWGQGTLVTVSS

SEQ ID NO: 1742 - protein, 124 aa, synthetic construct
QVQLVQSGAEVKKPGASVKVSCKVSGFSVNSYNVHWVRQAPGQGLEWMGVMWLGSNTDYNSKFQGRVTMTRDTSTNTVYMELSSLRSEDTAVYYCARAGRYYHGSNYYWDFPYWGQGTLVTVSS

SEQ ID NO: 1743 - protein, 124 aa, synthetic construct
QVQLVQSGAEVKKPGASVKVSCKVSGFSVDSYNVHWVRQAPGQGLEWMGVMWSGGNHDYNSKFQGRVTMTRDTSTNTVYMELSSLRSEDTAVYYCARAGRYYHDSNYYWDFPYWGQGTLVTVSS

SEQ ID NO: 1744 - protein, 124 aa, synthetic construct
QVQLVQSGAEVKKPGASVKVSCKVSGFSVTSYNVHWVRQAPGQGLEWMGVMWLGENTDYNSKFQGRVTMTRDTSTNTVYMELSSLRSEDTAVYYCARAGRYYVDSNYYWDFPYWGQGTLVTVSS

SEQ ID NO: 1745 - protein, 124 aa, synthetic construct
QVQLVQSGAEVKKPGASVKVSCKVSGFSVTSYNVHWVRQAPGQGLEWMGVMWSGGNTDYNSKFQGRVTMTRDTSTNTVYMELSSLRSEDTAVYYCARAGRYYHGANYYWDFPYWGQGTLVTVSS

SEQ ID NO: 1746 - protein, 124 aa, synthetic construct
QVQLVQSGAEVKKPGASVKVSCKVSGFSVTSYNVHWVRQAPGQGLEWMGVMWSGGNTDYNSKFQGRVTMTRDTSTNTVYMELSSLRSEDTAVYYCARAGRYYGDLNYYWDFPYWGQGTLVTVSS

SEQ ID NO: 1747 - protein, 124 aa, synthetic construct
QVQLVQSGAEVKKPGASVKVSCKVSGFSVTSYNVHWVRQAPGQGLEWMGVMWSGRNTDYNSKFQGRVTMTRDTSTNTVYMELSSLRSEDTAVYYCARAGRYYGDSDYYWDFPYWGQGTLVTVSS

SEQ ID NO: 1748 - protein, 124 aa, synthetic construct
QVQLVQSGAEVKKPGASVKVSCKVSGFSVTSYNVHWVRQAPGQGLEWMGVMWSGKNTDYNSKFQGRVTMTRDTSTNTVYMELSSLRSEDTAVYYCARAGRYYHDSNYYWDFPYWGQGTLVTVSS

SEQ ID NO: 1749 - protein, 124 aa, synthetic construct
QVQLVQSGAEVKKPGASVKVSCKVSGFSVTSYNVHWVRQAPGQGLEWMGVMWSGGQTDYNSKFQGRVTMTRDTSTNTVYMELSSLRSEDTAVYYCARAGRYYHDSFYYWDFPYWGQGTLVTVSS

SEQ ID NO: 1750 - protein, 124 aa, synthetic construct
QVQLVQSGAEVKKPGASVKVSCKVSGFSVTSYNVHWVRQAPGQGLEWMGVMWSGGQTDYNSKFQGRVTMTRDTSTNTVYMELSSLRSEDTAVYYCARAGRYYGDSDYYWDFPYWGQGTLVTVSS

SEQ ID NO: 1751 - protein, 124 aa, synthetic construct
QVQLVQSGAEVKKPGASVKVSCKVSGFSVTSYNVHWVRQAPGQGLEWMGVMWSGGNTDYNSKFQGRVTMTRDTSTNTVYMELSSLRSEDTAVYYCARAGRYYHDANYAWDFPYWGQGTLVTVSS

SEQ ID NO: 1752 - protein, 124 aa, synthetic construct
QVQLVQSGAEVKKPGASVKVSCKVSGFSVTSYNVHWVRQAPGQGLEWMGVMWSGGNTDYNSKFQGRVTMTRDTSTNTVYMELSSLRSEDTAVYYCARAGRYYSDSGYYWDFPYWGQGTLVTVSS

SEQ ID NO: 1753 - protein, 124 aa, synthetic construct
QVQLVQSGAEVKKPGASVKVSCKVSGFSVTSYNVHWVRQAPGQGLEWMGVMWSGGNTGYNSKFQGRVTMTRDTSTNTVYMELSSLRSEDTAVYYCARAGRYYGDSDYYWDFPYWGQGTLVTVSS

SEQ ID NO: 1754 - protein, 124 aa, synthetic construct
QVQLVQSGAEVKKPGASVKVSCKVSGFSVTNYNVHWVRQAPGQGLEWMGVMWYGGNTDYNSKFQGRVTMTRDTSTNTVYMELSSLRSEDTAVYYCARAGRYYHDSNYYWDFPYWGQGTLVTVSS

SEQ ID NO: 1755 - protein, 124 aa, synthetic construct
QVQLVQSGAEVKKPGASVKVSCKVSGFSVTSQNVHWVRQAPGQGLEWMGVMRSGGNTDYNSKFQGRVTMTRDTSTNTVYMELSSLRSEDTAVYYCARAGRYYHDSNWYWDFPYWGQGTLVTVSS

SEQ ID NO: 1756 - protein, 124 aa, synthetic construct
QVQLVQSGAEVKKPGASVKVSCKVSGGSVTSYRVHWVRQAPGQGLEWMGVMWSGGNTDYNSKFQGRVTMTRDTSTNTVYMELSSLRSEDTAVYYCARAGRYYGDSNYYWDFPYWGQGTLVTVSS

SEQ ID NO: 1757 - protein, 124 aa, synthetic construct
QVQLVQSGAEVKKPGASVKVSCKVSGFSSTSYNVHWVRQAPGQGLEWMGVMWRNGNTDYNSKFQGRVTMTRDTSTNTVYMELSSLRSEDTAVYYCARAGRYYHDSGYYWDFPYWGQGTLVTVSS

SEQ ID NO: 1758 - protein, 124 aa, synthetic construct
QVQLVQSGAEVKKPGASVKVSCKVSGFSVTTDNVHWVRQAPGQGLEWMGVMWRGGNQDYNSKFQGRVTMTRDTSTNTVYMELSSLRSEDTAVYYCARIGRYYHESNYYWDFPYWGQGTLVTVSS

SEQ ID NO: 1759 - protein, 124 aa, synthetic construct
QVQLVQSGAEVKKPGASVKVSCKVSGFSVTSYNVHWVRQAPGQGLEWMGVMWIGGNTDYNSKFQGRVTMTRDTSTNTVYMELSSLRSEDTAVYYCARAGRYYHDDNYYWDFPYWGQGTLVTVSS

SEQ ID NO: 1760 - protein, 124 aa, synthetic construct
QVQLVQSGAEVKKPGASVKVSCKVSGFSVNSYNVHWVRQAPGQGLEWMGVMWIGGNTDYNSKFQGRVTMTRDTSTNTVYMELSSLRSEDTAVYYCARAGRYYHDSNYYWDFPYWGQGTLVTVSS

SEQ ID NO: 1761 - protein, 124 aa, synthetic construct
QVQLVQSGAEVKKPGASVKVSCKVSGFSVTSYNVHWVRQAPGQGLEWMGVMWSGKNTDYNSKFQGRVTMTRDTSTNTVYMELSSLRSEDTAVYYCARAGRYYHESNYYWDFPYWGQGTLVTVSS

SEQ ID NO: 1762 - protein, 124 aa, synthetic construct
QVQLVQSGAEVKKPGASVKVSCKVSGFEVTKYNVHWVRQAPGQGLEWMGVMWEGGNTDYNSKFQGRVTMTRDTSTNTVYMELSSLRSEDTAVYYCARAGRYYHDSNYYWDFPYWGQGTLVTVSS

SEQ ID NO: 1763 - protein, 124 aa, synthetic construct
QVQLVQSGAEVKKPGASVKVSCKVSGFSVTSYNVHWVRQAPGQGLEWMGVMWNGGNQDYNSKFQGRVTMTRDTSTNTVYMELSSLRSEDTAVYYCARAGRYYHDSNYYWDFPYWGQGTLVTVSS

SEQ ID NO: 1764 - protein, 124 aa, synthetic construct
QVQLVQSGAEVKKPGASVKVSCKVSGFSVTSYNVHWVRQAPGQGLEWMGVMWSGGNTDYNSKFQGRVTMTRDTSTNTVYMELSSLRSEDTAVYYCARAGRYYLDVNYYWDFPYWGQGTLVTVSS

SEQ ID NO: 1765 - protein, 124 aa, synthetic construct
QVQLVQSGAEVKKPGASVKVSCKVSGHSVTSRNVHWVRQAPGQGLEWMGVMWFIGNTDYNSKFQGRVTMTRDTSTNTVYMELSSLRSEDTAVYYCARAGRYYHDSNYYWDFPYWGQGTLVTVSS

SEQ ID NO: 1766 - protein, 124 aa, synthetic construct
QVQLVQSGAEVKKPGASVKVSCKVSGFSVTSYNVHWVRQAPGQGLEWMGVMWSGGQTDYNSKFQGRVTMTRDTSTNTVYMELSSLRSEDTAVYYCARAGRYYHDANYYWDFPYWGQGTLVTVSS

SEQ ID NO: 1767 - protein, 124 aa, synthetic construct
QVQLVQSGAEVKKPGASVKVSCKVSGFSVTSYNVHWVRQAPGQGLEWMGVMWPDGNTDYNSKFQGRVTMTRDTSTNTVYMELSSLRSEDTAVYYCARAGRYYHDSNYYWDFPYWGQGTLVTVSS

SEQ ID NO: 1768 - protein, 124 aa, synthetic construct
QVQLVQSGAEVKKPGASVKVSCKVSGFSVTSYNVHWVRQAPGQGLEWMGVMWIGGNSDYNSKFQGRVTMTRDTSTNTVYMELSSLRSEDTAVYYCARAGRYYHDSNYYWDFPYWGQGTLVTVSS

SEQ ID NO: 1769 - protein, 124 aa, synthetic construct
QVQLVQSGAEVKKPGASVKVSCKVSGFSVASYNVHWVRQAPGQGLEWMGVMWSGGNTDYNSKFQGRVTMTRDTSTNTVYMELSSLRSEDTAVYYCARAGRYYGDSDYYWDFPYWGQGTLVTVSS

SEQ ID NO: 1770 - protein, 124 aa, synthetic construct
QVQLVQSGAEVKKPGASVKVSCKVSGFSVTSYNVHWVRQAPGQGLEWMGVMWIGSNTDYNSKFQGRVTMTRDTSTNTVYMELSSLRSEDTAVYYCARAGRYYHDSNYYWDFPYWGQGTLVTVSS

SEQ ID NO: 1771 - protein, 124 aa, synthetic construct
QVQLVQSGAEVKKPGASVKVSCKVSGFSVTSQNVHWVRQAPGQGLEWMGVMWSNGNTDYNSKFQGRVTMTRDTSTNTVYMELSSLRSEDTAVYYCARVGRYYHDSNYYWDFPYWGQGTLVTVSS

SEQ ID NO: 1772 - protein, 124 aa, synthetic construct
QVQLVQSGAEVKKPGASVKVSCKVSGFSVTSYNVHWVRQAPGQGLEWMGVMWSGGNTDYNSKFQGRVTMTRDTSTNTVYMELSSLRSEDTAVYYCARAGRYYHDENYYWDFPYWGQGTLVTVSS

SEQ ID NO: 1773 - protein, 124 aa, synthetic construct
QVQLVQSGAEVKKPGASVKVSCKVSGFKVTSYNVHWVRQAPGQGLEWMGVMWHGGNTDYNSKFQGRVTMTRDTSTNTVYMELSSLRSEDTAVYYCARAGRYYHDSNYYWDFPYWGQGTLVTVSS

SEQ ID NO: 1774 - protein, 124 aa, synthetic construct
QVQLVQSGAEVKKPGASVKVSCKVSGFSVTSYNVHWVRQAPGQGLEWMGVMWSGGQTDYNSKFQGRVTMTRDTSTNTVYMELSSLRSEDTAVYYCARAGRYYHDSSYYWDFPYWGQGTLVTVSS

SEQ ID NO: 1775 - protein, 124 aa, synthetic construct
QVQLVQSGAEVKKPGASVKVSCKVSGFFVTSHNVHWVRQAPGQGLEWMGVMRSGWNTDYNSKFQGRVTMTRDTSTNTVYMELSSLRSEDTAVYYCARAGRYYHDSNYYWDFPYWGQGTLVTVSS

SEQ ID NO: 1776 - protein, 124 aa, synthetic construct
QVQLVQSGAEVKKPGASVKVSCKVSGFSVTAYNVHWVRQAPGQGLEWMGVMWSGGNTDYNSKFQGRVTMTRDTSTNTVYMELSSLRSEDTAVYYCARAGRYYGDSDYYWDFPYWGQGTLVTVSS

SEQ ID NO: 1777 - protein, 124 aa, synthetic construct
QVQLVQSGAEVKKPGASVKVSCKVSGFSVTSYNVHWVRQAPGQGLEWMGVMWHYGNTDYNSKFQGRVTMTRDTSTNTVYMELSSLRSEDTAVYYCARAGRYYHDSNYYWDFPYWGQGTLVTVSS

SEQ ID NO: 1778 - protein, 124 aa, synthetic construct
QVQLVQSGAEVKKPGASVKVSCKVSGFTSTSYNVHWVRQAPGQGLEWMGVMWYGGKTDYNSKFQGRVTMTRDTSTNTVYMELSSLRSEDTAVYYCARAGRYYHGSNYYWDFPYWGQGTLVTVSS

SEQ ID NO: 1779 - protein, 124 aa, synthetic construct
QVQLVQSGAEVKKPGASVKVSCKVSGFSVTSYNVHWVRQAPGQGLEWMGVMWSGGNTDYNSKFQGRVTMTRDTSTNTVYMELSSLRSEDTAVYYCARGGRYYGDSNYYWDFPYWGQGTLVTVSS

SEQ ID NO: 1780 - protein, 124 aa, synthetic construct
QVQLVQSGAEVKKPGASVKVSCKVSGFSVPSYNVHWVRQAPGQGLEWMGVMWSGGNTDYNSKFQGRVTMTRDTSTNTVYMELSSLRSEDTAVYYCARAGRYYGDSDYYWDFPYWGQGTLVTVSS

SEQ ID NO: 1781 - protein, 124 aa, synthetic construct
QVQLVQSGAEVKKPGASVKVSCKVSGQQVTSYNVHWVRQAPGQGLEWMGVMWRGGNLDYNSKFQGRVTMTRDTSTNTVYMELSSLRSEDTAVYYCARAGRYYHDSNYYWDFPYWGQGTLVTVSS

SEQ ID NO: 1782 - protein, 124 aa, synthetic construct
QVQLVQSGAEVKKPGASVKVSCKVSGFLVRSYNVHWVRQAPGQGLEWMGVMWSTGNGDYNSKFQGRVTMTRDTSTNTVYMELSSLRSEDTAVYYCARAGRYYHDSNYYWDFPYWGQGTLVTVSS

SEQ ID NO: 1783 - protein, 124 aa, synthetic construct
QVQLVQSGAEVKKPGASVKVSCKVSGFSVTFYPVHWVRQAPGQGLEWMGVMWSGGRTDYNSKFQGRVTMTRDTSTNTVYMELSSLRSEDTAVYYCARAGRYYHDSNYYWDFPYWGQGTLVTVSS

SEQ ID NO: 1784 - protein, 124 aa, synthetic construct; identical to SEQ ID NO: 1200

SEQ ID NO: 1785 - protein, 124 aa, synthetic construct
QVQLVQSGAEVKKPGASVKVSCKVSGFSVTSYNVHWVRQAPGQGLEWMGVMWSGRNTDYNSKFQGRVTMTRDTSTNTVYMELSSLRSEDTAVYYCARAGRYYVDSNYYWDFPYWGQGTLVTVSS

SEQ ID NO: 1786 - protein, 124 aa, synthetic construct
QVQLVQSGAEVKKPGASVKVSCKVSGFSVVSYNVHWVRQAPGQGLEWMGVMWRGGNTDYNSKFQGRVTMTRDTSTNTVYMELSSLRSEDTAVYYCARAGRYYGDSDYYWDFPYWGQGTLVTVSS

SEQ ID NO: 1787 - protein, 124 aa, synthetic construct
QVQLVQSGAEVKKPGASVKVSCKVSGFSVTSYNVHWVRQAPGQGLEWMGVMWRGGNTDYNSKFQGRVTMTRDTSTNTVYMELSSLRSEDTAVYYCARAGRYYGDSDYYWDFPYWGQGTLVTVSS

SEQ ID NO: 1788 - protein, 124 aa, synthetic construct
QVQLVQSGAEVKKPGASVKVSCKVSGFSVISYNVHWVRQAPGQGLEWMGVMWSGGNTDYNSKFQGRVTMTRDTSTNTVYMELSSLRSEDTAVYYCARAGRYYGDSDYYWDFPYWGQGTLVTVSS

SEQ ID NO: 1789 - protein, 124 aa, synthetic construct
QVQLVQSGAEVKKPGASVKVSCKVSGFRVTSYNVHWVRQAPGQGLEWMGVMWSGGNTDYNSKFQGRVTMTRDTSTNTVYMELSSLRSEDTAVYYCARAGRYYGDSDYYWDFPYWGQGTLVTVSS

SEQ ID NO: 1790 - protein, 124 aa, synthetic construct
QVQLVQSGAEVKKPGASVKVSCKVSGFGVTSYNVHWVRQAPGQGLEWMGVMWRGGNTDYNSKFQGRVTMTRDTSTNTVYMELSSLRSEDTAVYYCARAGRYYGDSDYYWDFPYWGQGTLVTVSS

SEQ ID NO: 1791 - protein, 124 aa, synthetic construct
QVQLVQSGAEVKKPGASVKVSCKVSGFSVASYNVHWVRQAPGQGLEWMGVMRSLGNTDYNSKFQGRVTMTRDTSTNTVYMELSSLRSEDTAVYYCARAGRYYGDSNYYWDFPYWGQGTLVTVSS

SEQ ID NO: 1792 - protein, 124 aa, synthetic construct
QVQLVQSGAEVKKPGASVKVSCKVSGGSVTSHNVHWVRQAPGQGLEWMGVMWSGGNTDYNSKFQGRVTMTRDTSTNTVYMELSSLRSEDTAVYYCARAGRYYGDSNYYWDFPYWGQGTLVTVSS

SEQ ID NO: 1793 - protein, 124 aa, synthetic construct
QVQLVQSGAEVKKPGASVKVSCKVSGFSVNVYNVHWVRQAPGQGLEWMGVMESGRNTDYNSKFQGRVTMTRDTSTNTVYMELSSLRSEDTAVYYCARAGRYYHDSNYYWDFPYWGQGTLVTVSS

SEQ ID NO: 1794 - protein, 124 aa, synthetic construct
QVQLVQSGAEVKKPGASVKVSCKVSGFSVTSYNVHWVRQAPGQGLEWMGVMWSGGNTDYNSKFQGRVTMTRDTSTNTVYMELSSLRSEDTAVYYCARTGRYYHDSFYYWDFPYWGQGTLVTVSS

SEQ ID NO: 1795 - protein, 124 aa, synthetic construct
QVQLVQSGAEVKKPGASVKVSCKVSGFSVTSYNVHWVRQAPGQGLEWMGVMWSGGNTDYNSKFQGRVTMTRDTSTNTVYMELSSLRSEDTAVYYCARTGRYYHGSNYYWDFPYWGQGTLVTVSS

SEQ ID NO: 1796 - protein, 124 aa, synthetic construct
QVQLVQSGAEVKKPGASVKVSCKVSGFSVTSYNVHWVRQAPGQGLEWMGVMWSGGNTDYNSKFQGRVTMTRDTSTNTVYMELSSLRSEDTAVYYCARAGRYYVDSAYYWDFPYWGQGTLVTVSS

SEQ ID NO: 1797 - protein, 124 aa, synthetic construct
QVQLVQSGAEVKKPGASVKVSCKVSGFSVTSYNVHWVRQAPGQGLEWMGVMWSGGNTDYNSKFQGRVTMTRDTSTNTVYMELSSLRSEDTAVYYCARAGRYYVGSNYYWDFPYWGQGTLVTVSS

SEQ ID NO: 1798 - protein, 124 aa, synthetic construct
QVQLVQSGAEVKKPGASVKVSCKVSGFSVTSYNVHWVRQAPGQGLEWMGVMWSGGNTDYNSKFQGRVTMTRDTSTNTVYMELSSLRSEDTAVYYCARAGRYYVDSKYYWDFPYWGQGTLVTVSS

SEQ ID NO: 1799 - protein, 124 aa, synthetic construct
QVQLVQSGAEVKKPGASVKVSCKVSGFSVTSYNVHWVRQAPGQGLEWMGVMWSGGNTDYNSKFQGRVTMTRDTSTNTVYMELSSLRSEDTAVYYCARAGRYYQGSNYYWDFPYWGQGTLVTVSS

SEQ ID NO: 1800 - protein, 124 aa, synthetic construct
QVQLVQSGAEVKKPGASVKVSCKVSGGSVTSYNVHWVRQAPGQGLEWMGVMWAGGNTDYNSKFQGRVTMTRDTSTNTVYMELSSLRSEDTAVYYCARAGRYYGDSDYYWDFPYWGQGTLVTVSS

SEQ ID NO: 1801 - protein, 124 aa, synthetic construct
QVQLVQSGAEVKKPGASVKVSCKVSGGSVTSHNVHWVRQAPGQGLEWMGVMWSGGNTDYNSKFQGRVTMTRDTSTNTVYMELSSLRSEDTAVYYCARAGRYYGDSDYYWDFPYWGQGTLVTVSS

SEQ ID NO: 1802 - protein, 124 aa, synthetic construct
QVQLVQSGAEVKKPGASVKVSCKVSGFLVTTYNVHWVRQAPGQGLEWMGVMWFGGNTDYNSKFQGRVTMTRDTSTNTVYMELSSLRSEDTAVYYCARAGRYYHDSDYYWDFPYWGQGTLVTVSS

SEQ ID NO: 1803 - protein, 124 aa, synthetic construct
QVQLVQSGAEVKKPGASVKVSCKVSGFYVTSYNVHWVRQAPGQGLEWMGVMWSGGNTDYNSKFQGRVTMTRDTSTNTVYMELSSLRSEDTAVYYCARAGRYYHDSNYYWDFPYWGQGTLVTVSS

SEQ ID NO: 1804 - protein, 124 aa, synthetic construct
QVQLVQSGAEVKKPGASVKVSCKVSGFSVWSYNVHWVRQAPGQGLEWMGVMWSGGNTDYNSKFQGRVTMTRDTSTNTVYMELSSLRSEDTAVYYCARAGRYYHDSNYYWDFPYWGQGTLVTVSS

SEQ ID NO: 1805 - protein, 124 aa, synthetic construct
QVQLVQSGAEVKKPGASVKVSCKVSGFSVTSYNVHWVRQAPGQGLEWMGVMWKGGNTDYNSKFQGRVTMTRDTSTNTVYMELSSLRSEDTAVYYCARAGRYYHDSNYYWDFPYWGQGTLVTVSS

SEQ ID NO: 1806 - protein, 124 aa, synthetic construct
QVQLVQSGAEVKKPGASVKVSCKVSGFSVTSYNVHWVRQAPGQGLEWMGVMWSGANTDYNSKFQGRVTMTRDTSTNTVYMELSSLRSEDTAVYYCARAGRYYHDSNYYWDFPYWGQGTLVTVSS

SEQ ID NO: 1807 - protein, 124 aa, synthetic construct
QVQLVQSGAEVKKPGASVKVSCKVSGFYVWSYNVHWVRQAPGQGLEWMGVMWSGGNTDYNSKFQGRVTMTRDTSTNTVYMELSSLRSEDTAVYYCARAGRYYHDSNYYWDFPYWGQGTLVTVSS

SEQ ID NO: 1808 - protein, 124 aa, synthetic construct
QVQLVQSGAEVKKPGASVKVSCKVSGFYVTSYNVHWVRQAPGQGLEWMGVMWKGGNTDYNSKFQGRVTMTRDTSTNTVYMELSSLRSEDTAVYYCARAGRYYHDSNYYWDFPYWGQGTLVTVSS

SEQ ID NO: 1809 - protein, 124 aa, synthetic construct
QVQLVQSGAEVKKPGASVKVSCKVSGFYVTSYNVHWVRQAPGQGLEWMGVMWSGANTDYNSKFQGRVTMTRDTSTNTVYMELSSLRSEDTAVYYCARAGRYYHDSNYYWDFPYWGQGTLVTVSS

SEQ ID NO: 1810 - protein, 124 aa, synthetic construct
QVQLVQSGAEVKKPGASVKVSCKVSGFSVWSYNVHWVRQAPGQGLEWMGVMWKGGNTDYNSKFQGRVTMTRDTSTNTVYMELSSLRSEDTAVYYCARAGRYYHDSNYYWDFPYWGQGTLVTVSS

SEQ ID NO: 1811 - protein, 124 aa, synthetic construct
QVQLVQSGAEVKKPGASVKVSCKVSGFSVWSYNVHWVRQAPGQGLEWMGVMWSGANTDYNSKFQGRVTMTRDTSTNTVYMELSSLRSEDTAVYYCARAGRYYHDSNYYWDFPYWGQGTLVTVSS

SEQ ID NO: 1812 - protein, 124 aa, synthetic construct
QVQLVQSGAEVKKPGASVKVSCKVSGFSVTSYNVHWVRQAPGQGLEWMGVMWKGANTDYNSKFQGRVTMTRDTSTNTVYMELSSLRSEDTAVYYCARAGRYYHDSNYYWDFPYWGQGTLVTVSS

SEQ ID NO: 1813 - protein, 124 aa, synthetic construct
QVQLVQSGAEVKKPGASVKVSCKVSGFYVWSYNVHWVRQAPGQGLEWMGVMWKGGNTDYNSKFQGRVTMTRDTSTNTVYMELSSLRSEDTAVYYCARAGRYYHDSNYYWDFPYWGQGTLVTVSS

SEQ ID NO: 1814 - protein, 124 aa, synthetic construct
QVQLVQSGAEVKKPGASVKVSCKVSGFYVWSYNVHWVRQAPGQGLEWMGVMWSGANTDYNSKFQGRVTMTRDTSTNTVYMELSSLRSEDTAVYYCARAGRYYHDSNYYWDFPYWGQGTLVTVSS

SEQ ID NO: 1815 - protein, 124 aa, synthetic construct
QVQLVQSGAEVKKPGASVKVSCKVSGFYVTSYNVHWVRQAPGQGLEWMGVMWKGANTDYNSKFQGRVTMTRDTSTNTVYMELSSLRSEDTAVYYCARAGRYYHDSNYYWDFPYWGQGTLVTVSS

SEQ ID NO: 1816 - protein, 124 aa, synthetic construct
QVQLVQSGAEVKKPGASVKVSCKVSGFSVWSYNVHWVRQAPGQGLEWMGVMWKGANTDYNSKFQGRVTMTRDTSTNTVYMELSSLRSEDTAVYYCARAGRYYHDSNYYWDFPYWGQGTLVTVSS

SEQ ID NO: 1817 - protein, 124 aa, synthetic construct
QVQLVQSGAEVKKPGASVKVSCKVSGFSVTSYPVHWVRQAPGQGLEWMGVMWSGGNTDYNSKFQGRVTMTRDTSTNTVYMELSSLRSEDTAVYYCARAGRYYHDSNYYWDFPYWGQGTLVTVSS

SEQ ID NO: 1818 - protein, 124 aa, synthetic construct
QVQLVQSGAEVKKPGASVKVSCKVSGFSVTSYNVHWVRQAPGQGLEWMGVMWSGGKTDYNSKFQGRVTMTRDTSTNTVYMELSSLRSEDTAVYYCARAGRYYHDSNYYWDFPYWGQGTLVTVSS

SEQ ID NO: 1819 - protein, 124 aa, synthetic construct
QVQLVQSGAEVKKPGASVKVSCKVSGFSVLSYNVHWVRQAPGQGLEWMGVMWSGGNTDYNSKFQGRVTMTRDTSTNTVYMELSSLRSEDTAVYYCARAGRYYHDSNYYWDFPYWGQGTLVTVSS

SEQ ID NO: 1820 - protein, 124 aa, synthetic construct
QVQLVQSGAEVKKPGASVKVSCKVSGFSVTSYNVHWVRQAPGQGLEWMGVMWSKGNTDYNSKFQGRVTMTRDTSTNTVYMELSSLRSEDTAVYYCARAGRYYHDSNYYWDFPYWGQGTLVTVSS

SEQ ID NO: 1821 - protein, 124 aa, synthetic construct
QVQLVQSGAEVKKPGASVKVSCKVSGFSVTSQNVHWVRQAPGQGLEWMGVMWSGGNTDYNSKFQGRVTMTRDTSTNTVYMELSSLRSEDTAVYYCARAGRYYHDSNYYWDFPYWGQGTLVTVSS

SEQ ID NO: 1822 - protein, 124 aa, synthetic construct
QVQLVQSGAEVKKPGASVKVSCKVSGFSVTSYNVHWVRQAPGQGLEWMGVMASGGNTDYNSKFQGRVTMTRDTSTNTVYMELSSLRSEDTAVYYCARAGRYYHDSNYYWDFPYWGQGTLVTVSS

SEQ ID NO: 1823 - protein, 124 aa, synthetic construct
QVQLVQSGAEVKKPGASVKVSCKVSGFSVTSYNVHWVRQAPGQGLEWMGVMWSGGNTDYNSKFQGRVTMTRDTSTNTVYMELSSLRSEDTAVYYCARAGRYYHRSNYYWDFPYWGQGTLVTVSS

SEQ ID NO: 1824 - protein, 107 aa, synthetic construct
DIQMTQSPSSVSASVGDRVTITCRASEDIYSGLAWYQQKPGKSPKLLIYGASSLQSGVPSRFSGSGSGTDYTLTISSLQPEDFATYFCQEGLKSPYTFGAGTKLEIK

SEQ ID NO: 1825 - protein, 107 aa, synthetic construct
DIQMTQSPSSVSASVGDRVTITCRASEDIYSGLAWYQQKPGKSPKLLIYGASSLQTGVPSRFSGSGSGTDYTLTISSLQPEDFATYFCQEGLKSPYTFGAGTKLEIK

SEQ ID NO: 1826 - protein, 107 aa, synthetic construct
DIQMTQSPSSVSASVGDRVTITCRASEDISSGLAWYQQKPGKSPKLLIYGAASLQDGVPSRFSGSGSGTDYTLTISSLQPEDFATYFCQEGLGSPYTFGAGTKLEIK

SEQ ID NO: 1827 - protein, 107 aa, synthetic construct
DIQMTQSPSSVSASVGDRVTITCRASQDIYSGLAWYQQKPGKSPKLLIYGASSLQDGVPSRFSGSGSGTDYTLTISSLQPEDFATYFCQEGLKSPYTFGAGTKLEIK

SEQ ID NO: 1828 - protein, 107 aa, synthetic construct
DIQMTQSPSSVSASVGDRVTITCRASEGIYSGLAWYQQKPGKSPKLLIYGASSLQDGVPSRFSGSGSGTDYTLTISSLQPEDFATYFCQEGLKSPYTFGAGTKLEIK

SEQ ID NO: 1829 - protein, 107 aa, synthetic construct
DIQMTQSPSSVSASVGDRVTITCRASEDISSGLAWYQQKPGKSPKLLIYGASSLQDGVPSRFSGSGSGTDYTLTISSLQPEDFATYFCQEGLKSPYTFGAGTKLEIK

SEQ ID NO: 1830 - protein, 107 aa, synthetic construct
DIQMTQSPSSVSASVGDRVTITCRASGDIRSGLAWYQQKPGKSPKLLIYGAASLQDGVPSRFSGSGSGTDYTLTISSLQPEDFATYFCQEGLKRPYTFGAGTKLEIK

SEQ ID NO: 1831 - protein, 107 aa, synthetic construct
DIQMTQSPSSVSASVGDRVTITCRASEDIYSYLAWYQQKPGKSPKLLIYGASSLQDGVPSRFSGSGSGTDYTLTISSLQPEDFATYFCQEGLKSPYTFGAGTKLEIK

SEQ ID NO: 1832 - protein, 107 aa, synthetic construct
DIQMTQSPSSVSASVGDRVTITCRASEDIYSALAWYQQKPGKSPKLLIYGASSLQDGVPSRFSGSGSGTDYTLTISSLQPEDFATYFCQEGLKSPYTFGAGTKLEIK

SEQ ID NO: 1833 - protein, 107 aa, synthetic construct
DIQMTQSPSSVSASVGDRVTITCRASEDIYSNLAWYQQKPGKSPKLLIYGASSLQDGVPSRFSGSGSGTDYTLTISSLQPEDFATYFCQEGLKSPYTFGAGTKLEIK

SEQ ID NO: 1834 - protein, 107 aa, synthetic construct
DIQMTQSPSSVSASVGDRVTITCRASEDIYSSLAWYQQKPGKSPKLLIYGASSLQDGVPSRFSGSGSGTDYTLTISSLQPEDFATYFCQEGLKSPYTFGAGTKLEIK

SEQ ID NO: 1835 - protein, 107 aa, synthetic construct
DIQMTQSPSSVSASVGDRVTITCRASEDIYSWLAWYQQKPGKSPKLLIYGASSLQDGVPSRFSGSGSGTDYTLTISSLQPEDFATYFCQEGLKSPYTFGAGTKLEIK

SEQ ID NO: 1836 - protein, 107 aa, synthetic construct
DIQMTQSPSSVSASVGDRVTITCRASEDIYSGLAWYQQKPGKAPKLLIYGASSLQDGVPSRFSGSGSGTDYTLTISSLQPEDFATYFCQEGLKSPYTFGAGTKLEIK

SEQ ID NO: 1837 - protein, 107 aa, synthetic construct
DIQMTQSPSSVSASVGDRVTITCRASEDIYSGLAWYQQKPGKVPKLLIYGASSLQDGVPSRFSGSGSGTDYTLTISSLQPEDFATYFCQEGLKSPYTFGAGTKLEIK

SEQ ID NO: 1838 - protein, 107 aa, synthetic construct
DIQMTQSPSSVSASVGDRVTITCRASEDIYSGLAWYQQKPGKSPKLLIYAASSLQDGVPSRFSGSGSGTDYTLTISSLQPEDFATYFCQEGLKSPYTFGAGTKLEIK

SEQ ID NO: 1839 - protein, 107 aa, synthetic construct
DIQMTQSPSSVSASVGDRVTITCRASEDIYSGLAWYQQKPGKSPKLLIYDASSLQDGVPSRFSGSGSGTDYTLTISSLQPEDFATYFCQEGLKSPYTFGAGTKLEIK

SEQ ID NO: 1840 - protein, 107 aa, synthetic construct
DIQMTQSPSSVSASVGDRVTITCRASEDIYSGLAWYQQKPGKSPKLLIYWASSLQDGVPSRFSGSGSGTDYTLTISSLQPEDFATYFCQEGLKSPYTFGAGTKLEIK

SEQ ID NO: 1841 - protein, 107 aa, synthetic construct
DIQMTQSPSSVSASVGDRVTITCRASEDIYSGLAWYQQKPGKSPKLLIYKASSLQDGVPSRFSGSGSGTDYTLTISSLQPEDFATYFCQEGLKSPYTFGAGTKLEIK

SEQ ID NO: 1842 - protein, 107 aa, synthetic construct
DIQMTQSPSSVSASVGDRVTITCRASEDIYSGLAWYQQKPGKSPKLLIYGASSLQDGVPSRFSGSGSGTDFTLTISSLQPEDFATYFCQEGLKSPYTFGAGTKLEIK

SEQ ID NO: 1843 - protein, 107 aa, synthetic construct
DIQMTQSPSSVSASVGDRVTITCRASEDIYSGLAWYQQKPGKSPKLLIYGASSLQDGVPSRFSGSGSGTDYTLTISSLQPEDFATYYCQEGLKSPYTFGAGTKLEIK

SEQ ID NO: 1844 - protein, 107 aa, synthetic construct
DIQMTQSPSSVSASVGDRVTITCRASEDIYSGLAWYQQKPGKSPKLLIYGASSLQDGVPSRFSGSGSGTDYTLTISSLQPEDFATYFCQQGLKSPYTFGAGTKLEIK

SEQ ID NO: 1845 - protein, 107 aa, synthetic construct
DIQMTQSPSSVSASVGDRVTITCRASEDIYSGLAWYQQKPGKSPKLLIYGASSLQDGVPSRFSGSGSGTDYTLTISSLQPEDFATYFCQEALKSPYTFGAGTKLEIK

SEQ ID NO: 1846 - protein, 107 aa, synthetic construct
DIQMTQSPSSVSASVGDRVTITCRASEDIYSGLAWYQQKPGKSPKLLIYGASSLQDGVPSRFSGSGSGTDYTLTISSLQPEDFATYFCQEGLSSPYTFGAGTKLEIK

SEQ ID NO: 1847 - protein, 107 aa, synthetic construct
DIQMTQSPSSVSASVGDRVTITCRASEDIYSGLAWYQQKPGKSPKLLIYGASSLQDGVPSRFSGSGSGTDYTLTISSLQPEDFATYFCQEGLKFPYTFGAGTKLEIK

SEQ ID NO: 1848 - protein, 107 aa, synthetic construct; identical to SEQ ID NO: 1204

SEQ ID NO: 1849 - protein, 107 aa, synthetic construct
DIQMTQSPASVSASVGDRVTITCRASEDIYSGLAWYQQKPGKSPKLLIYGASSLQDGVPSRFSGSGSGTDYTLTISSLQPEDFATYFCQEGLKSPYTFGAGTKLEIK

SEQ ID NO: 1850 - protein, 107 aa, synthetic construct
DIQMTQSPSSLSASVGDRVTITCRASEDIYSGLAWYQQKPGKSPKLLIYGASSLQDGVPSRFSGSGSGTDYTLTISSLQPEDFATYFCQEGLKSPYTFGAGTKLEIK

SEQ ID NO: 1851 - protein, 107 aa, synthetic construct
DIQMTQSPSSVSASLGDRVTITCRASEDIYSGLAWYQQKPGKSPKLLIYGASSLQDGVPSRFSGSGSGTDYTLTISSLQPEDFATYFCQEGLKSPYTFGAGTKLEIK

SEQ ID NO: 1852 - protein, 107 aa, synthetic construct
DIQMTQSPSSVSASVGERVTITCRASEDIYSGLAWYQQKPGKSPKLLIYGASSLQDGVPSRFSGSGSGTDYTLTISSLQPEDFATYFCQEGLKSPYTFGAGTKLEIK

SEQ ID NO: 1853 - protein, 107 aa, synthetic construct
DIQMTQSPSSVSASVGDTVTITCRASEDIYSGLAWYQQKPGKSPKLLIYGASSLQDGVPSRFSGSGSGTDYTLTISSLQPEDFATYFCQEGLKSPYTFGAGTKLEIK

SEQ ID NO: 1854 - protein, 107 aa, synthetic construct
DIQMTQSPSSVSASVGDRVTIQCRASEDIYSGLAWYQQKPGKSPKLLIYGASSLQDGVPSRFSGSGSGTDYTLTISSLQPEDFATYFCQEGLKSPYTFGAGTKLEIK

SEQ ID NO: 1855 - protein, 107 aa, synthetic construct
DIQMTQSPSSVSASVGDRVTITCRASEDIYSGLAWYQQKPGKSPHLLIYGASSLQDGVPSRFSGSGSGTDYTLTISSLQPEDFATYFCQEGLKSPYTFGAGTKLEIK

SEQ ID NO: 1856 - protein, 107 aa, synthetic construct
DIQMTQSPSSVSASVGDRVTITCRASEDIYSGLAWYQQKPGKSPQLLIYGASSLQDGVPSRFSGSGSGTDYTLTISSLQPEDFATYFCQEGLKSPYTFGAGTKLEIK

SEQ ID NO: 1857 - protein, 107 aa, synthetic construct
DIQMTQSPSSVSASVGDRVTITCRASEDIYSGLAWYQQKPGKSPKLLIYGTSSLQDGVPSRFSGSGSGTDYTLTISSLQPEDFATYFCQEGLKSPYTFGAGTKLEIK

SEQ ID NO: 1858 - protein, 107 aa, synthetic construct
DIQMTQSPSSVSASVGDRVTITCRASEDIYSGLAWYQQKPGKSPKLLIYGASSLQDGVPSRFSGSGSGTQYTLTISSLQPEDFATYFCQEGLKSPYTFGAGTKLEIK

SEQ ID NO: 1859 - protein, 107 aa, synthetic construct
DIQMTQSPSSVSASVGDRVTITCRASEDIYSGLAWYQQKPGKSPKLLIYGASSLQDGVPSRFSGSGSGTDYSLTISSLQPEDFATYFCQEGLKSPYTFGAGTKLEIK

SEQ ID NO: 1860 - protein, 107 aa, synthetic construct
DIQMTQSPSSVSASVGDRVTITCRASEDIYSGLAWYQQKPGKSPKLLIYGASSLQDGVPSRFSGSGSGTDYTLKISSLQPEDFATYFCQEGLKSPYTFGAGTKLEIK

SEQ ID NO: 1861 - protein, 107 aa, synthetic construct
DIQMTQSPSSVSASVGDRVTITCRASEDIYSGLAWYQQKPGKSPKLLIYGASSLQDGVPSRFSGSGSGTDYTLTISSMQPEDFATYFCQEGLKSPYTFGAGTKLEIK

SEQ ID NO: 1862 - protein, 107 aa, synthetic construct
DIQMTQSPSSVSASVGDRVTITCRASEDIYSGLAWYQQKPGKSPKLLIYGASSLQDGVPSRFSGSGSGTDYTLTISSLQTEDFATYFCQEGLKSPYTFGAGTKLEIK

SEQ ID NO: 1863 - protein, 107 aa, synthetic construct
DIQMTQSPSSVSASVGDRVTITCRASEDIYSGLAWYQQKPGKSPKLLIYGASSLQDGVPSRFSGSGSGTDYTLTISSLQPEDEATYFCQEGLKSPYTFGAGTKLEIK

SEQ ID NO: 1864 - protein, 107 aa, synthetic construct
DIQMTQSPSSVSASVGDRVTITCRASEDIYSGLAWYQQKPGKSPKLLIYGASSLQDGVPSRFSGSGSGTDYTLTISSLQPEDFGTYFCQEGLKSPYTFGAGTKLEIK

SEQ ID NO: 1865 - protein, 107 aa, synthetic construct
DIQMTQSPSSVSASVGDRVTITCRASEDIYSGLAWYQQKPGKSPKLLIYGASSLQDGVPSRFSGSGSGTDYTLTISSLQPEDFAVYFCQEGLKSPYTFGAGTKLEIK

SEQ ID NO: 1866 - protein, 107 aa, synthetic construct
DIQMTQSPSSVSASVGDRVTITCRASEDIYSGLAWYQQKPGKSPKLLIYGASSLQDGVPSRFSGSGSGTDYTLTISSLQPEDFATYFCQEGLKYPYTFGAGTKLEIK

SEQ ID NO: 1867 - protein, 107 aa, synthetic construct
DIQMTQSPSSVSASVGDRVTITCRASEDIYSGLAWYQQKPGKSPKLLIYGASSLQDGVPSRFSGSGSGTDYTLTISSLQPEDFATYFCQEGLKSPYTFGAGTKLELK

SEQ ID NO: 1868 - protein, 107 aa, synthetic construct
DIQMTQSPSSVSASVGDRVTITCRASEDIYSGLAWYQQKPGKSPKLLIYGASSLQDGVPSRFSGSGSGTDYTLTISSLQPEDFATYFCQQGLKYPYTFGAGTKLEIK

SEQ ID NO: 1869 - protein, 107 aa, synthetic construct
DIQMTQSPSSVSASVGDRVTITCRASEDIYSGLAWYQQKPGKSPKLLIYGTSSLQDGVPSRFSGSGSGTDYTLTISSLQPEDFATYFCQQGLKYPYTFGAGTKLEIK

SEQ ID NO: 1870 - protein, 107 aa, synthetic construct
DIQMTQSPSSVSASVGDRVTITCRASEDVYSGLAWYQQKPGKSPKLLIYGASSLVDGVPSRFSGSGSGTDYTLTISSLQPEDFATYFCQEGGKSPYTFGAGTKLEIK

SEQ ID NO: 1871 - protein, 107 aa, synthetic construct
DIQMTQSPSSVSASVGDRVTITCRASEPIYSGLAWYQQKPGKSPKLLIYGASSIQDGVPSRFSGSGSGTDYTLTISSLQPEDFATYFCQEGAKSPYTFGAGTKLEIK

SEQ ID NO: 1872 - protein, 107 aa, synthetic construct
DIQMTQSPSSVSASVGDRVTITCRASEEIYSGLAWYQQKPGKSPKLLIYGASSLQDGVPSRFSGSGSGTDYTLTISSLQPEDFATYFCQEGLKSPYMFGAGTKLEIK

SEQ ID NO: 1873 - protein, 107 aa, synthetic construct
DIQMTQSPSSVSASVGDRVTITCRASEDTYSGLAWYQQKPGKSPKLLIYGASNLQDGVPSRFSGSGSGTDYTLTISSLQPEDFATYFCQEGLKSPYTFGAGTKLEIK

SEQ ID NO: 1874 - protein, 107 aa, synthetic construct
DIQMTQSPSSVSASVGDRVTITCRASEDIASGLAWYQQKPGKSPKLLIYGASSAQDGVPSRFSGSGSGTDYTLTISSLQPEDFATYFCQEGLRSPYTFGAGTKLEIK

SEQ ID NO: 1875 - protein, 107 aa, synthetic construct
DIQMTQSPSSVSASVGDRVTITCRASGDIYSGLAWYQQKPGKSPKLLIYGASALQDGVPSRFSGSGSGTDYTLTISSLQPEDFATYFCQEGLKPPYTFGAGTKLEIK

SEQ ID NO: 1876 - protein, 107 aa, synthetic construct
DIQMTQSPSSVSASVGDRVTITCRASEAIYSGLAWYQQKPGKSPKLLIYGASSLQEGVPSRFSGSGSGTDYTLTISSLQPEDFATYFCQEGLRSPYTFGAGTKLEIK

SEQ ID NO: 1877 - protein, 107 aa, synthetic construct
DIQMTQSPSSVSASVGDRVTITCRASEDIYSGLAWYQQKPGKSPKLLIYGTSSLQDGVPSRFSGSGSGTDYTLTISSLQPEDFATYFCQEGSKSPYTFGAGTKLEIK

SEQ ID NO: 1878 - protein, 107 aa, synthetic construct
DIQMTQSPSSVSASVGDRVTITCRASEAIYSGLAWYQQKPGKSPKLLIYGASSLQDGVPSRFSGSGSGTDYTLTISSLQPEDFATYFCQEGLKMPYTFGAGTKLEIK

SEQ ID NO: 1879 - protein, 107 aa, synthetic construct
DIQMTQSPSSVSASVGDRVTITCRASEDIYVGLAWYQQKPGKSPKLLIYGASSLQDGVPSRFSGSGSGTDYTLTISSLQPEDFATYFCQEGFKSPYTFGAGTKLEIK

SEQ ID NO: 1880 - protein, 107 aa, synthetic construct
DIQMTQSPSSVSASVGDRVTITCRASEDIYSALAWYQQKPGKSPKLLIYGASSAQDGVPSRFSGSGSGTDYTLTISSLQPEDFATYFCQEGLKKPYTFGAGTKLEIK

SEQ ID NO: 1881 - protein, 107 aa, synthetic construct
DIQMTQSPSSVSASVGDRVTITCRASEDIYSGLAWYQQKPGKSPKLLIYGAASLQDGVPSRFSGSGSGTDYTLTISSLQPEDFATYFCQEGFKSPYTFGAGTKLEIK

SEQ ID NO: 1882 - protein, 107 aa, synthetic construct
DIQMTQSPSSVSASVGDRVTITCRASERIYSGLAWYQQKPGKSPKLLIYGASSLQDGVPSRFSGSGSGTDYTLTISSLQPEDFATYFCQEGKKSPYTFGAGTKLEIK

SEQ ID NO: 1883 - protein, 107 aa, synthetic construct
DIQMTQSPSSVSASVGDRVTITCRASEDIVSGLAWYQQKPGKSPKLLIYGAASLQDGVPSRFSGSGSGTDYTLTISSLQPEDFATYFCQEGAKSPYTFGAGTKLEIK

SEQ ID NO: 1884 - protein, 107 aa, synthetic construct
DIQMTQSPSSVSASVGDRVTITCRASEDVYSGLAWYQQKPGKSPKLLIYGASGLQDGVPSRFSGSGSGTDYTLTISSLQPEDFATYFCQEGLKVPYTFGAGTKLEIK

SEQ ID NO: 1885 - protein, 107 aa, synthetic construct
DIQMTQSPSSVSASVGDRVTITCRASEDIVSGLAWYQQKPGKSPKLLIYGASALQDGVPSRFSGSGSGTDYTLTISSLQPEDFATYFCQEGLRSPYTFGAGTKLEIK

SEQ ID NO: 1886 - protein, 107 aa, synthetic construct
DIQMTQSPSSVSASVGDRVTITCRASDDIYSGLAWYQQKPGKSPKLLIYGASSLLDGVPSRFSGSGSGTDYTLTISSLQPEDFATYFCQEGGKSPYTFGAGTKLEIK

SEQ ID NO: 1887 - protein, 107 aa, synthetic construct
DIQMTQSPSSVSASVGDRVTITCRASERIYSGLAWYQQKPGKSPKLLIYGASSLQPGVPSRFSGSGSGTDYTLTISSLQPEDFATYFCQEGLKSPYTFGAGTKLEIK

SEQ ID NO: 1888 - protein, 107 aa, synthetic construct
DIQMTQSPSSVSASVGDRVTITCRASEDIGSGLAWYQQKPGKSPKLLIYGAFSLQDGVPSRFSGSGSGTDYTLTISSLQPEDFATYFCQEGLKKPYTFGAGTKLEIK

SEQ ID NO: 1889 - protein, 107 aa, synthetic construct
DIQMTQSPSSVSASVGDRVTITCRASESIYSGLAWYQQKPGKSPKLLIYGASSLQDGVPSRFSGSGSGTDYTLTISSLQPEDFATYFCQEGLKPPYTFGAGTKLEIK

SEQ ID NO: 1890 - protein, 107 aa, synthetic construct
DIQMTQSPSSVSASVGDRVTITCRASEDIYRGLAWYQQKPGKSPKLLIYGAGSLQDGVPSRFSGSGSGTDYTLTISSLQPEDFATYFCQEGLKSSYTFGAGTKLEIK

SEQ ID NO: 1891 - protein, 107 aa, synthetic construct
DIQMTQSPSSVSASVGDRVTITCRASETIYSGLAWYQQKPGKSPKLLIYGASSGQDGVPSRFSGSGSGTDYTLTISSLQPEDFATYFCQEGLKAPYTFGAGTKLEIK

SEQ ID NO: 1892 - protein, 107 aa, synthetic construct
DIQMTQSPSSVSASVGDRVTITCRASGDIYSGLAWYQQKPGKSPKLLIYSASSLQDGVPSRFSGSGSGTDYTLTISSLQPEDFATYFCQEGLKRPYTFGAGTKLEIK

SEQ ID NO: 1893 - protein, 107 aa, synthetic construct
DIQMTQSPSSVSASVGDRVTITCRASEGIYSGLAWYQQKPGKSPKLLIYGAGSLQDGVPSRFSGSGSGTDYTLTISSLQPEDFATYFCQEGRKSPYTFGAGTKLEIK

SEQ ID NO: 1894 - protein, 107 aa, synthetic construct
DIQMTQSPSSVSASVGDRVTITCRASEQIYSGLAWYQQKPGKSPKLLIYGASGLQDGVPSRFSGSGSGTDYTLTISSLQPEDFATYFCQEGLGSPYTFGAGTKLEIK

SEQ ID NO: 1895 - protein, 107 aa, synthetic construct
DIQMTQSPSSVSASVGDRVTITCRASEDIGSGLAWYQQKPGKSPKLLIYGARSLQDGVPSRFSGSGSGTDYTLTISSLQPEDFATYFCQEGLKSPYAFGAGTKLEIK

SEQ ID NO: 1896 - protein, 107 aa, synthetic construct
DIQMTQSPSSVSASVGDRVTITCRASEDGYSGLAWYQQKPGKSPKLLIYGASSRQDGVPSRFSGSGSGTDYTLTISSLQPEDFATYFCQEGLKVPYTFGAGTKLEIK

SEQ ID NO: 1897 - protein, 107 aa, synthetic construct
DIQMTQSPSSVSASVGDRVTITCRASTDIYSGLAWYQQKPGKSPKLLIYGASSLQDGVPSRFSGSGSGTDYTLTISSLQPEDFATYFCQEGTKSPYTFGAGTKLEIK

SEQ ID NO: 1898 - protein, 107 aa, synthetic construct
DIQMTQSPSSVSASVGDRVTITCRASELIYSGLAWYQQKPGKSPKLLIYGASSLQDGVPSRFSGSGSGTDYTLTISNLQPEDFATYFCQEGLKSPYGFGAGTKLEIK

SEQ ID NO: 1899 - protein, 107 aa, synthetic construct
DIQMTQSPSSVSASVGDRVTITCRASQDIASGLAWYQQKPGKSPKLLIYGASSWLDGVPSRFSGSGSGTDYTLTISSLQPEDFATYFCQEGLKPPYTFGAGTKLEIK

SEQ ID NO: 1900 - protein, 107 aa, synthetic construct
DIQMTQSPSSVSASVGDRVTITCRASEDIYSSLAWYQQKPGKSPKLLIYGGSGLQDGVPSRFSGSGSGTDYTLTISSLQPEDFATYFCQEGGKSPYTFGAGTKLEIK

SEQ ID NO: 1901 - protein, 107 aa, synthetic construct
DIQMTQSPSSVSASVGDRVTITCRASEDGYRGLAWYQQKPGKSPKLLIYGASLLMDGVPSRFSGSGSGTDYTLTISSLQPEDFATYFCQEGRKSPYTFGAGTKLEIK

SEQ ID NO: 1902 - protein, 107 aa, synthetic construct
DIQMTQSPSSVSASVGDRVTITCRASEDITSGLAWYQQKPGKSPKLLIYGASSLQWGVPSRFSGSGSGTDYTLTISSLQPEDFATYFCQEGLKSPYGFGAGTKLEIK

SEQ ID NO: 1903 - protein, 107 aa, synthetic construct
DIQMTQSPSSVSASVGDRVTITCRASSDIYSGLAWYQQKPGKSPKLLIYSASALQDGVPSRFSGSGSGTDYTLTISSLQPEDFATYFCQEGLKMPYTFGAGTKLEIK

SEQ ID NO: 1904 - protein, 107 aa, synthetic construct
DIQMTQSPSSVSASVGDRVTITCRASDDIGSGLAWYQQKPGKSPKLLIYGASSQLDGVPSRFSGSGSGTDYTLTISSLQPEDFATYFCQEGLKSPYTFGAGTKLEIK

SEQ ID NO: 1905 - protein, 107 aa, synthetic construct
DIQMTQSPSSVSASVGDRVTITCRASGDIYSGLAWYQQKPGKSPKLLIYGASGLMDGVPSRFSGSGSGTDYTLTISSLQPEDFATYFCQEGLRSPYTFGAGTKLEIK

SEQ ID NO: 1906 - protein, 107 aa, synthetic construct
DIQMTQSPSSVSASVGDRVTITCRASEDIYFGLAWYQQKPGKSPKLLIYGSSSLLDGVPSRFSGSGSGTDYTLTISSLQPEDFATYFCQEGLKSPYTFGAGTKLEIK

SEQ ID NO: 1907 - protein, 107 aa, synthetic construct
DIQMTQSPSSVSASVGDRVTITCRASYDIESGLAWYQQKPGKSPKLLIYGASSLMSGVPSRFSGSGSGTDYTLTISSLQPEDFATYFCQEGLKSPYTFGAGTKLEIK

SEQ ID NO: 1908 - protein, 107 aa, synthetic construct
DIQMTQSPSSVSASVGDRVTITCRASEDIVSGLAWYQQKPGKSPKLLIYGASSLGDGVPSRFSGSGSGTDYTLTISSLQPEDFATYFCQEGLKRPYTFGAGTKLEIK

SEQ ID NO: 1909 - protein, 107 aa, synthetic construct
DIQMTQSPSSVSASVGDRVTITCRASEDSYSALAWYQQKPGKSPKLLIYGASSLADGVPSRFSGSGSGTDYTLTISSLQPEDFATYFCQEGSKSPYTFGAGTKLEIK

SEQ ID NO: 1910 - protein, 107 aa, synthetic construct
DIQMTQSPSRVSASVGDRVTITCRASETISSGLAWYQQKPGKSPKLLIYAASSLQDGVPSRFSGSGSGTDYTLTISSLQPEDFATYFCQEGLKTPYTFGAGTKLEIK

SEQ ID NO: 1911 - protein, 107 aa, synthetic construct
DIQMTQSPSSVSASVGDRVTITCRASENIVSGLAWYQQKPGKSPKLLIYAASSTQDGVPSRFSGSGSGTDYTLTISSLQPEDFATYFCQEGLKSPYTFGAGTKLEIK

SEQ ID NO: 1912 - protein, 107 aa, synthetic construct
DIQMTQSPSSVSASVGDRVTITCRASELLYSGLAWYQQKPGKSPKLLIYGASSVWDGVPSRFSGSGSGTDYTLTISSLQPEDFATYFCQEGLKSPYMFGAGTKLEIK

SEQ ID NO: 1913 - protein, 107 aa, synthetic construct
DIQMTQSPSSVSASVGDRVTITCRASLDIRSGLAWYQQKPGKSPKLLIYSASSRQDGVPSRFSGSGSGTDYTLTISSLQPEDFATYFCQEGAKPPYTFGAGTKLEIK

SEQ ID NO: 1914 - protein, 107 aa, synthetic construct
DIQMTQSPSSVSASVGDRVTITCRASERIRSGLAWYQQKPGKSPKLLIYGASELFDGVPSRFSGSGSGTDYTLTISSLQPEDFATYFCQEGGRSPYTFGAGTKLEIK

SEQ ID NO: 1915 - protein, 107 aa, synthetic construct
DIQMTQSPSSVSASVGDRVTITCRASERIYGGLAWYQQKPGKSPKLLIYGASSLADGVPSRFSGSGSGTDYTLTISSLQPEDFATYFCQEGLKAPYRFGAGTKLEIK

SEQ ID NO: 1916 - protein, 107 aa, synthetic construct
DIQMTQSPSSVSASVGDRVTITCRASEDIGSGLAWYQQKPGKSPKLLIYGASSRQDGVPSRFSGSGSGTDYTLTISSLQPEDFATYFCQEGRKSPYGFGAGTKLEIK

SEQ ID NO: 1917 - protein, 107 aa, synthetic construct
DIQMTQSPSSVSASVGDRVTITCRASEDIHQGLAWYQQKPGKSPKLLIYGAIALQDGVPSRFSGSGSGTDYTLTISSLQPEDFATYFCQEGLKSPTGFGAGTKLEIK

SEQ ID NO: 1918 - protein, 107 aa, synthetic construct
DIQMTQSPSSVSASVGDRVTITCRASRDIYLGLAWYQQKPGKSPKLLIYGASSSYDGVPSRFSGSGSGTDYTLTISSLQPEDFATYFCQEGLKLPYTFGAGTKLEIK

SEQ ID NO: 1919 - protein, 107 aa, synthetic construct
DIQMTQSPSSVSASVGDRVTITCRASMDIRSGLAWYQQKPGKSPKLLIYGASSANDGVPSRFSGSGSGTDYTLTISSLQPEDFATYFCQEGLLGPYTFGAGTKLEIK

SEQ ID NO: 1920 - protein, 107 aa, synthetic construct
DIQMTQSPSSVSASVGDRVTITCRASEDIYGSLAWYQQKPGKSPKLLIYGASGLQLGVPSRFSGSGSGTDYTLTISSLQPEDFATYFCQEGLKMPYYFGAGTKLEIK

SEQ ID NO: 1921 - protein, 107 aa, synthetic construct
DIQMTQSPSSVSASVGDRVTITCRASGDLYSGLAWYQQKPGKSPKLLIYGASALQDGVPSRFSGSGSGTDYTLTISSLQPEDFATYFCQEGNKQPYTFGAGTKLEIK

SEQ ID NO: 1922 - protein, 107 aa, synthetic construct
DIQMTQSPSSVSASVGDRVTITCRASERIYSGLAWYQQKPGKSPKLLIYGASTAQDGVPSRFSGSGSGTDYTLTISSLQPEDFATYFCQEGLKAPYTFGAGTKLEIK

SEQ ID NO: 1923 - protein, 107 aa, synthetic construct
DIQMTQSPSSVSASVGDRVTITCRASGDIGSGLAWYQQKPGKSPKLLIYSASSLQEGVPSRFSGSGSGTDYTLTISSLQPEDFATYFCQEGLFFPYTFGAGTKLEIK

SEQ ID NO: 1924 - protein, 16 aa, synthetic construct
VMWYGGNTDYNSKFQG

SEQ ID NO: 1925 - skipped

SEQ ID NO: 1926 - protein, 16 aa, synthetic construct
VMWRGGNTDYNSKFQG

SEQ ID NO: 1927 - protein, 120 aa, synthetic construct
QVQLVQSGAEVKKPGSSVKVSCKSSGYTFTDQTIHWMRQAPGQGLEWIGYIYPRDDSPKYNENFKGKVTITADKSTSTAYMELSSLRSEDTAVYYCAIPDRSGYAWFIYWGQGTLVTVSS

SEQ ID NO: 1928 - protein, 120 aa, synthetic construct
QVQLVQSGAEVKKPGSSVKVSCKTSGYTFTDQTIHWMRQAPGQGLEWIGYIYPRDDSPKYNENFKGKVTITADKSTSTAYMELSSLRSEDTAVYYCAIPDRSGYAWFIYWGQGTLVTVSS

SEQ ID NO: 1929 - protein, 120 aa, synthetic construct
QVQLVQSGAEVKKPGSSVKVSCKGSGYTFTDQTIHWMRQAPGQGLEWIGYIYPRDDSPKYNENFKGKVTITADKSTSTAYMELSSLRSEDTAVYYCAIPDRSGYAWFIYWGQGTLVTVSS

SEQ ID NO: 1930 - protein, 120 aa, synthetic construct
QVQLVQSGAEVKKPGSSVKVSCKHSGYTFTDQTIHWMRQAPGQGLEWIGYIYPRDDSPKYNENFKGKVTITADKSTSTAYMELSSLRSEDTAVYYCAIPDRSGYAWFIYWGQGTLVTVSS

SEQ ID NO: 1931 - protein, 120 aa, synthetic construct
QVQLVQSGAEVKKPGSSVKVSCKLSGYTFTDQTIHWMRQAPGQGLEWIGYIYPRDDSPKYNENFKGKVTITADKSTSTAYMELSSLRSEDTAVYYCAIPDRSGYAWFIYWGQGTLVTVSS

SEQ ID NO: 1932 - protein, 120 aa, synthetic construct
QVQLVQSGAEVKKPGSSVKVSCKASGFTFTDQTIHWMRQAPGQGLEWIGYIYPRDDSPKYNENFKGKVTITADKSTSTAYMELSSLRSEDTAVYYCAIPDRSGYAWFIYWGQGTLVTVSS

SEQ ID NO: 1933 - protein, 120 aa, synthetic construct
QVQLVQSGAEVKKPGSSVKVSCKASGHTFTDQTIHWMRQAPGQGLEWIGYIYPRDDSPKYNENFKGKVTITADKSTSTAYMELSSLRSEDTAVYYCAIPDRSGYAWFIYWGQGTLVTVSS

SEQ ID NO: 1934 - protein, 120 aa, synthetic construct
QVQLVQSGAEVKKPGSSVKVSCKASGLTFTDQTIHWMRQAPGQGLEWIGYIYPRDDSPKYNENFKGKVTITADKSTSTAYMELSSLRSEDTAVYYCAIPDRSGYAWFIYWGQGTLVTVSS

SEQ ID NO: 1935 - protein, 120 aa, synthetic construct
QVQLVQSGAEVKKPGSSVKVSCKASGWTFTDQTIHWMRQAPGQGLEWIGYIYPRDDSPKYNENFKGKVTITADKSTSTAYMELSSLRSEDTAVYYCAIPDRSGYAWFIYWGQGTLVTVSS

SEQ ID NO: 1936 - protein, 120 aa, synthetic construct
QVQLVQSGAEVKKPGSSVKVSCKASGATFTDQTIHWMRQAPGQGLEWIGYIYPRDDSPKYNENFKGKVTITADKSTSTAYMELSSLRSEDTAVYYCAIPDRSGYAWFIYWGQGTLVTVSS

SEQ ID NO: 1937 - protein, 120 aa, synthetic construct
QVQLVQSGAEVKKPGSSVKVSCKASGYVFTDQTIHWMRQAPGQGLEWIGYIYPRDDSPKYNENFKGKVTITADKSTSTAYMELSSLRSEDTAVYYCAIPDRSGYAWFIYWGQGTLVTVSS

SEQ ID NO: 1938 - protein, 120 aa, synthetic construct
QVQLVQSGAEVKKPGSSVKVSCKASGYSFTDQTIHWMRQAPGQGLEWIGYIYPRDDSPKYNENFKGKVTITADKSTSTAYMELSSLRSEDTAVYYCAIPDRSGYAWFIYWGQGTLVTVSS

SEQ ID NO: 1939 - protein, 120 aa, synthetic construct
QVQLVQSGAEVKKPGSSVKVSCKASGYAFTDQTIHWMRQAPGQGLEWIGYIYPRDDSPKYNENFKGKVTITADKSTSTAYMELSSLRSEDTAVYYCAIPDRSGYAWFIYWGQGTLVTVSS

SEQ ID NO: 1940 - protein, 120 aa, synthetic construct
QVQLVQSGAEVKKPGSSVKVSCKASGYQFTDQTIHWMRQAPGQGLEWIGYIYPRDDSPKYNENFKGKVTITADKSTSTAYMELSSLRSEDTAVYYCAIPDRSGYAWFIYWGQGTLVTVSS

SEQ ID NO: 1941 - protein, 120 aa, synthetic construct
QVQLVQSGAEVKKPGSSVKVSCKASGYFFTDQTIHWMRQAPGQGLEWIGYIYPRDDSPKYNENFKGKVTITADKSTSTAYMELSSLRSEDTAVYYCAIPDRSGYAWFIYWGQGTLVTVSS

SEQ ID NO: 1942 - protein, 120 aa, synthetic construct
QVQLVQSGAEVKKPGSSVKVSCKASGYTLTDQTIHWMRQAPGQGLEWIGYIYPRDDSPKYNENFKGKVTITADKSTSTAYMELSSLRSEDTAVYYCAIPDRSGYAWFIYWGQGTLVTVSS

SEQ ID NO: 1943 - protein, 120 aa, synthetic construct
QVQLVQSGAEVKKPGSSVKVSCKASGYTWTDQTIHWMRQAPGQGLEWIGYIYPRDDSPKYNENFKGKVTITADKSTSTAYMELSSLRSEDTAVYYCAIPDRSGYAWFIYWGQGTLVTVSS

SEQ ID NO: 1944 - protein, 120 aa, synthetic construct
QVQLVQSGAEVKKPGSSVKVSCKASGYTITDQTIHWMRQAPGQGLEWIGYIYPRDDSPKYNENFKGKVTITADKSTSTAYMELSSLRSEDTAVYYCAIPDRSGYAWFIYWGQGTLVTVSS

SEQ ID NO: 1945 - protein, 120 aa, synthetic construct
QVQLVQSGAEVKKPGSSVKVSCKASGYTHTDQTIHWMRQAPGQGLEWIGYIYPRDDSPKYNENFKGKVTITADKSTSTAYMELSSLRSEDTAVYYCAIPDRSGYAWFIYWGQGTLVTVSS

SEQ ID NO: 1946 - protein, 120 aa, synthetic construct
QVQLVQSGAEVKKPGSSVKVSCKASGYTQTDQTIHWMRQAPGQGLEWIGYIYPRDDSPKYNENFKGKVTITADKSTSTAYMELSSLRSEDTAVYYCAIPDRSGYAWFIYWGQGTLVTVSS

SEQ ID NO: 1947 - protein, 120 aa, synthetic construct
QVQLVQSGAEVKKPGSSVKVSCKASGYTFVDQTIHWMRQAPGQGLEWIGYIYPRDDSPKYNENFKGKVTITADKSTSTAYMELSSLRSEDTAVYYCAIPDRSGYAWFIYWGQGTLVTVSS

SEQ ID NO: 1948 - protein, 120 aa, synthetic construct
QVQLVQSGAEVKKPGSSVKVSCKASGYTFSDQTIHWMRQAPGQGLEWIGYIYPRDDSPKYNENFKGKVTITADKSTSTAYMELSSLRSEDTAVYYCAIPDRSGYAWFIYWGQGTLVTVSS

SEQ ID NO: 1949 - protein, 120 aa, synthetic construct
QVQLVQSGAEVKKPGSSVKVSCKASGYTFADQTIHWMRQAPGQGLEWIGYIYPRDDSPKYNENFKGKVTITADKSTSTAYMELSSLRSEDTAVYYCAIPDRSGYAWFIYWGQGTLVTVSS

SEQ ID NO: 1950 - protein, 120 aa, synthetic construct
QVQLVQSGAEVKKPGSSVKVSCKASGYTFQDQTIHWMRQAPGQGLEWIGYIYPRDDSPKYNENFKGKVTITADKSTSTAYMELSSLRSEDTAVYYCAIPDRSGYAWFIYWGQGTLVTVSS

SEQ ID NO: 1951 - protein, 120 aa, synthetic construct
QVQLVQSGAEVKKPGSSVKVSCKASGYTFHDQTIHWMRQAPGQGLEWIGYIYPRDDSPKYNENFKGKVTITADKSTSTAYMELSSLRSEDTAVYYCAIPDRSGYAWFIYWGQGTLVTVSS

SEQ ID NO: 1952 - protein, 120 aa, synthetic construct
QVQLVQSGAEVKKPGSSVKVSCKASGYTFTGQTIHWMRQAPGQGLEWIGYIYPRDDSPKYNENFKGKVTITADKSTSTAYMELSSLRSEDTAVYYCAIPDRSGYAWFIYWGQGTLVTVSS

SEQ ID NO: 1953 - protein, 120 aa, synthetic construct
QVQLVQSGAEVKKPGSSVKVSCKASGYTFTHQTIHWMRQAPGQGLEWIGYIYPRDDSPKYNENFKGKVTITADKSTSTAYMELSSLRSEDTAVYYCAIPDRSGYAWFIYWGQGTLVTVSS

SEQ ID NO: 1954 - protein, 120 aa, synthetic construct
QVQLVQSGAEVKKPGSSVKVSCKASGYTFTSQTIHWMRQAPGQGLEWIGYIYPRDDSPKYNENFKGKVTITADKSTSTAYMELSSLRSEDTAVYYCAIPDRSGYAWFIYWGQGTLVTVSS

SEQ ID NO: 1955 - protein, 120 aa, synthetic construct
QVQLVQSGAEVKKPGSSVKVSCKASGYTFTRQTIHWMRQAPGQGLEWIGYIYPRDDSPKYNENFKGKVTITADKSTSTAYMELSSLRSEDTAVYYCAIPDRSGYAWFIYWGQGTLVTVSS

SEQ ID NO: 1956 - protein, 120 aa, synthetic construct
QVQLVQSGAEVKKPGSSVKVSCKASGYTFTLQTIHWMRQAPGQGLEWIGYIYPRDDSPKYNENFKGKVTITADKSTSTAYMELSSLRSEDTAVYYCAIPDRSGYAWFIYWGQGTLVTVSS

SEQ ID NO: 1957 - protein, 120 aa, synthetic construct
QVQLVQSGAEVKKPGSSVKVSCKASGYTFTDETIHWMRQAPGQGLEWIGYIYPRDDSPKYNENFKGKVTITADKSTSTAYMELSSLRSEDTAVYYCAIPDRSGYAWFIYWGQGTLVTVSS

SEQ ID NO: 1958 - protein, 120 aa, synthetic construct
QVQLVQSGAEVKKPGSSVKVSCKASGYTFTDSTIHWMRQAPGQGLEWIGYIYPRDDSPKYNENFKGKVTITADKSTSTAYMELSSLRSEDTAVYYCAIPDRSGYAWFIYWGQGTLVTVSS

SEQ ID NO: 1959 - protein, 120 aa, synthetic construct
QVQLVQSGAEVKKPGSSVKVSCKASGYTFTDHTIHWMRQAPGQGLEWIGYIYPRDDSPKYNENFKGKVTITADKSTSTAYMELSSLRSEDTAVYYCAIPDRSGYAWFIYWGQGTLVTVSS

SEQ ID NO: 1960 - protein, 120 aa, synthetic construct
QVQLVQSGAEVKKPGSSVKVSCKASGYTFTDNTIHWMRQAPGQGLEWIGYIYPRDDSPKYNENFKGKVTITADKSTSTAYMELSSLRSEDTAVYYCAIPDRSGYAWFIYWGQGTLVTVSS

SEQ ID NO: 1961 - protein, 120 aa, synthetic construct
QVQLVQSGAEVKKPGSSVKVSCKASGYTFTDATIHWMRQAPGQGLEWIGYIYPRDDSPKYNENFKGKVTITADKSTSTAYMELSSLRSEDTAVYYCAIPDRSGYAWFIYWGQGTLVTVSS

SEQ ID NO: 1962 - protein, 120 aa, synthetic construct
QVQLVQSGAEVKKPGSSVKVSCKASGYTFTDQVIHWMRQAPGQGLEWIGYIYPRDDSPKYNENFKGKVTITADKSTSTAYMELSSLRSEDTAVYYCAIPDRSGYAWFIYWGQGTLVTVSS

SEQ ID NO: 1963 - protein, 120 aa, synthetic construct
QVQLVQSGAEVKKPGSSVKVSCKASGYTFTDQSIHWMRQAPGQGLEWIGYIYPRDDSPKYNENFKGKVTITADKSTSTAYMELSSLRSEDTAVYYCAIPDRSGYAWFIYWGQGTLVTVSS

SEQ ID NO: 1964 - protein, 120 aa, synthetic construct
QVQLVQSGAEVKKPGSSVKVSCKASGYTFTDQAIHWMRQAPGQGLEWIGYIYPRDDSPKYNENFKGKVTITADKSTSTAYMELSSLRSEDTAVYYCAIPDRSGYAWFIYWGQGTLVTVSS

SEQ ID NO: 1965 - protein, 120 aa, synthetic construct
QVQLVQSGAEVKKPGSSVKVSCKASGYTFTDQQIHWMRQAPGQGLEWIGYIYPRDDSPKYNENFKGKVTITADKSTSTAYMELSSLRSEDTAVYYCAIPDRSGYAWFIYWGQGTLVTVSS

SEQ ID NO: 1966 - protein, 120 aa, synthetic construct
QVQLVQSGAEVKKPGSSVKVSCKASGYTFTDQHIHWMRQAPGQGLEWIGYIYPRDDSPKYNENFKGKVTITADKSTSTAYMELSSLRSEDTAVYYCAIPDRSGYAWFIYWGQGTLVTVSS

SEQ ID NO: 1967 - protein, 120 aa, synthetic construct
QVQLVQSGAEVKKPGSSVKVSCKASGYTFTDQTLHWMRQAPGQGLEWIGYIYPRDDSPKYNENFKGKVTITADKSTSTAYMELSSLRSEDTAVYYCAIPDRSGYAWFIYWGQGTLVTVSS

SEQ ID NO: 1968 - protein, 120 aa, synthetic construct
QVQLVQSGAEVKKPGSSVKVSCKASGYTFTDQTFHWMRQAPGQGLEWIGYIYPRDDSPKYNENFKGKVTITADKSTSTAYMELSSLRSEDTAVYYCAIPDRSGYAWFIYWGQGTLVTVSS

SEQ ID NO: 1969 - protein, 120 aa, synthetic construct
QVQLVQSGAEVKKPGSSVKVSCKASGYTFTDQTTHWMRQAPGQGLEWIGYIYPRDDSPKYNENFKGKVTITADKSTSTAYMELSSLRSEDTAVYYCAIPDRSGYAWFIYWGQGTLVTVSS

SEQ ID NO: 1970 - protein, 120 aa, synthetic construct
QVQLVQSGAEVKKPGSSVKVSCKASGYTFTDQTWHWMRQAPGQGLEWIGYIYPRDDSPKYNENFKGKVTITADKSTSTAYMELSSLRSEDTAVYYCAIPDRSGYAWFIYWGQGTLVTVSS

SEQ ID NO: 1971 - protein, 120 aa, synthetic construct
QVQLVQSGAEVKKPGSSVKVSCKASGYTFTDQTAHWMRQAPGQGLEWIGYIYPRDDSPKYNENFKGKVTITADKSTSTAYMELSSLRSEDTAVYYCAIPDRSGYAWFIYWGQGTLVTVSS

SEQ ID NO: 1972 - protein, 120 aa, synthetic construct
QVQLVQSGAEVKKPGSSVKVSCKASGYTFTDQTIYWMRQAPGQGLEWIGYIYPRDDSPKYNENFKGKVTITADKSTSTAYMELSSLRSEDTAVYYCAIPDRSGYAWFIYWGQGTLVTVSS

SEQ ID NO: 1973 - protein, 120 aa, synthetic construct
QVQLVQSGAEVKKPGSSVKVSCKASGYTFTDQTIQWMRQAPGQGLEWIGYIYPRDDSPKYNENFKGKVTITADKSTSTAYMELSSLRSEDTAVYYCAIPDRSGYAWFIYWGQGTLVTVSS

SEQ ID NO: 1974 - protein, 120 aa, synthetic construct
QVQLVQSGAEVKKPGSSVKVSCKASGYTFTDQTIDWMRQAPGQGLEWIGYIYPRDDSPKYNENFKGKVTITADKSTSTAYMELSSLRSEDTAVYYCAIPDRSGYAWFIYWGQGTLVTVSS

SEQ ID NO: 1975 - protein, 120 aa, synthetic construct
QVQLVQSGAEVKKPGSSVKVSCKASGYTFTDQTITWMRQAPGQGLEWIGYIYPRDDSPKYNENFKGKVTITADKSTSTAYMELSSLRSEDTAVYYCAIPDRSGYAWFIYWGQGTLVTVSS

SEQ ID NO: 1976 - protein, 120 aa, synthetic construct
QVQLVQSGAEVKKPGSSVKVSCKASGYTFTDQTIAWMRQAPGQGLEWIGYIYPRDDSPKYNENFKGKVTITADKSTSTAYMELSSLRSEDTAVYYCAIPDRSGYAWFIYWGQGTLVTVSS

SEQ ID NO: 1977 - protein, 120 aa, synthetic construct
QVQLVQSGAEVKKPGSSVKVSCKASGYTFTDQTIHWMRQAPGQGLEWVGYIYPRDDSPKYNENFKGKVTITADKSTSTAYMELSSLRSEDTAVYYCAIPDRSGYAWFIYWGQGTLVTVSS

SEQ ID NO: 1978 - protein, 120 aa, synthetic construct
QVQLVQSGAEVKKPGSSVKVSCKASGYTFTDQTIHWMRQAPGQGLEWFGYIYPRDDSPKYNENFKGKVTITADKSTSTAYMELSSLRSEDTAVYYCAIPDRSGYAWFIYWGQGTLVTVSS

SEQ ID NO: 1979 - protein, 120 aa, synthetic construct
QVQLVQSGAEVKKPGSSVKVSCKASGYTFTDQTIHWMRQAPGQGLEWTGYIYPRDDSPKYNENFKGKVTITADKSTSTAYMELSSLRSEDTAVYYCAIPDRSGYAWFIYWGQGTLVTVSS

SEQ ID NO: 1980 - protein, 120 aa, synthetic construct
QVQLVQSGAEVKKPGSSVKVSCKASGYTFTDQTIHWMRQAPGQGLEWWGYIYPRDDSPKYNENFKGKVTITADKSTSTAYMELSSLRSEDTAVYYCAIPDRSGYAWFIYWGQGTLVTVSS

SEQ ID NO: 1981 - protein, 120 aa, synthetic construct
QVQLVQSGAEVKKPGSSVKVSCKASGYTFTDQTIHWMRQAPGQGLEWAGYIYPRDDSPKYNENFKGKVTITADKSTSTAYMELSSLRSEDTAVYYCAIPDRSGYAWFIYWGQGTLVTVSS

SEQ ID NO: 1982 - protein, 120 aa, synthetic construct
QVQLVQSGAEVKKPGSSVKVSCKASGYTFTDQTIHWMRQAPGQGLEWIGHIYPRDDSPKYNENFKGKVTITADKSTSTAYMELSSLRSEDTAVYYCAIPDRSGYAWFIYWGQGTLVTVSS

SEQ ID NO: 1983 - protein, 120 aa, synthetic construct
QVQLVQSGAEVKKPGSSVKVSCKASGYTFTDQTIHWMRQAPGQGLEWIGLIYPRDDSPKYNENFKGKVTITADKSTSTAYMELSSLRSEDTAVYYCAIPDRSGYAWFIYWGQGTLVTVSS

SEQ ID NO: 1984 - protein, 120 aa, synthetic construct
QVQLVQSGAEVKKPGSSVKVSCKASGYTFTDQTIHWMRQAPGQGLEWIGWIYPRDDSPKYNENFKGKVTITADKSTSTAYMELSSLRSEDTAVYYCAIPDRSGYAWFIYWGQGTLVTVSS

SEQ ID NO: 1985 - protein, 120 aa, synthetic construct
QVQLVQSGAEVKKPGSSVKVSCKASGYTFTDQTIHWMRQAPGQGLEWIGVIYPRDDSPKYNENFKGKVTITADKSTSTAYMELSSLRSEDTAVYYCAIPDRSGYAWFIYWGQGTLVTVSS

SEQ ID NO: 1986 - protein, 120 aa, synthetic construct
QVQLVQSGAEVKKPGSSVKVSCKASGYTFTDQTIHWMRQAPGQGLEWIGAIYPRDDSPKYNENFKGKVTITADKSTSTAYMELSSLRSEDTAVYYCAIPDRSGYAWFIYWGQGTLVTVSS

SEQ ID NO: 1987 - protein, 120 aa, synthetic construct
QVQLVQSGAEVKKPGSSVKVSCKASGYTFTDQTIHWMRQAPGQGLEWIGYVYPRDDSPKYNENFKGKVTITADKSTSTAYMELSSLRSEDTAVYYCAIPDRSGYAWFIYWGQGTLVTVSS

SEQ ID NO: 1988 - protein, 120 aa, synthetic construct
QVQLVQSGAEVKKPGSSVKVSCKASGYTFTDQTIHWMRQAPGQGLEWIGYFYPRDDSPKYNENFKGKVTITADKSTSTAYMELSSLRSEDTAVYYCAIPDRSGYAWFIYWGQGTLVTVSS

SEQ ID NO: 1989 - protein, 120 aa, synthetic construct
QVQLVQSGAEVKKPGSSVKVSCKASGYTFTDQTIHWMRQAPGQGLEWIGYTYPRDDSPKYNENFKGKVTITADKSTSTAYMELSSLRSEDTAVYYCAIPDRSGYAWFIYWGQGTLVTVSS

SEQ ID NO: 1990 - protein, 120 aa, synthetic construct
QVQLVQSGAEVKKPGSSVKVSCKASGYTFTDQTIHWMRQAPGQGLEWIGYWYPRDDSPKYNENFKGKVTITADKSTSTAYMELSSLRSEDTAVYYCAIPDRSGYAWFIYWGQGTLVTVSS

SEQ ID NO: 1991 - protein, 120 aa, synthetic construct
QVQLVQSGAEVKKPGSSVKVSCKASGYTFTDQTIHWMRQAPGQGLEWIGYAYPRDDSPKYNENFKGKVTITADKSTSTAYMELSSLRSEDTAVYYCAIPDRSGYAWFIYWGQGTLVTVSS

SEQ ID NO: 1992 - protein, 120 aa, synthetic construct
QVQLVQSGAEVKKPGSSVKVSCKASGYTFTDQTIHWMRQAPGQGLEWIGYIHPRDDSPKYNENFKGKVTITADKSTSTAYMELSSLRSEDTAVYYCAIPDRSGYAWFIYWGQGTLVTVSS

SEQ ID NO: 1993 - protein, 120 aa, synthetic construct
QVQLVQSGAEVKKPGSSVKVSCKASGYTFTDQTIHWMRQAPGQGLEWIGYILPRDDSPKYNENFKGKVTITADKSTSTAYMELSSLRSEDTAVYYCAIPDRSGYAWFIYWGQGTLVTVSS

SEQ ID NO: 1994 - protein, 120 aa, synthetic construct
QVQLVQSGAEVKKPGSSVKVSCKASGYTFTDQTIHWMRQAPGQGLEWIGYIWPRDDSPKYNENFKGKVTITADKSTSTAYMELSSLRSEDTAVYYCAIPDRSGYAWFIYWGQGTLVTVSS

SEQ ID NO: 1995 - protein, 120 aa, synthetic construct
QVQLVQSGAEVKKPGSSVKVSCKASGYTFTDQTIHWMRQAPGQGLEWIGYIVPRDDSPKYNENFKGKVTITADKSTSTAYMELSSLRSEDTAVYYCAIPDRSGYAWFIYWGQGTLVTVSS

SEQ ID NO: 1996 - protein, 120 aa, synthetic construct
QVQLVQSGAEVKKPGSSVKVSCKASGYTFTDQTIHWMRQAPGQGLEWIGYIAPRDDSPKYNENFKGKVTITADKSTSTAYMELSSLRSEDTAVYYCAIPDRSGYAWFIYWGQGTLVTVSS

SEQ ID NO: 1997 - protein, 120 aa, synthetic construct
QVQLVQSGAEVKKPGSSVKVSCKASGYTFTDQTIHWMRQAPGQGLEWIGYIYSRDDSPKYNENFKGKVTITADKSTSTAYMELSSLRSEDTAVYYCAIPDRSGYAWFIYWGQGTLVTVSS

SEQ ID NO: 1998 - protein, 120 aa, synthetic construct
QVQLVQSGAEVKKPGSSVKVSCKASGYTFTDQTIHWMRQAPGQGLEWIGYIYLRDDSPKYNENFKGKVTITADKSTSTAYMELSSLRSEDTAVYYCAIPDRSGYAWFIYWGQGTLVTVSS

SEQ ID NO: 1999 - protein, 120 aa, synthetic construct
QVQLVQSGAEVKKPGSSVKVSCKASGYTFTDQTIHWMRQAPGQGLEWIGYIYIRDDSPKYNENFKGKVTITADKSTSTAYMELSSLRSEDTAVYYCAIPDRSGYAWFIYWGQGTLVTVSS

SEQ ID NO: 2000 - protein, 120 aa, synthetic construct
QVQLVQSGAEVKKPGSSVKVSCKASGYTFTDQTIHWMRQAPGQGLEWIGYIYARDDSPKYNENFKGKVTITADKSTSTAYMELSSLRSEDTAVYYCAIPDRSGYAWFIYWGQGTLVTVSS

SEQ ID NO: 2001 - protein, 120 aa, synthetic construct
QVQLVQSGAEVKKPGSSVKVSCKASGYTFTDQTIHWMRQAPGQGLEWIGYIYQRDDSPKYNENFKGKVTITADKSTSTAYMELSSLRSEDTAVYYCAIPDRSGYAWFIYWGQGTLVTVSS

SEQ ID NO: 2002 - protein, 120 aa, synthetic construct
QVQLVQSGAEVKKPGSSVKVSCKASGYTFTDQTIHWMRQAPGQGLEWIGYIYPKDDSPKYNENFKGKVTITADKSTSTAYMELSSLRSEDTAVYYCAIPDRSGYAWFIYWGQGTLVTVSS

SEQ ID NO: 2003 - protein, 120 aa, synthetic construct
QVQLVQSGAEVKKPGSSVKVSCKASGYTFTDQTIHWMRQAPGQGLEWIGYIYPEDDSPKYNENFKGKVTITADKSTSTAYMELSSLRSEDTAVYYCAIPDRSGYAWFIYWGQGTLVTVSS

SEQ ID NO: 2004 - protein, 120 aa, synthetic construct
QVQLVQSGAEVKKPGSSVKVSCKASGYTFTDQTIHWMRQAPGQGLEWIGYIYPHDDSPKYNENFKGKVTITADKSTSTAYMELSSLRSEDTAVYYCAIPDRSGYAWFIYWGQGTLVTVSS

SEQ ID NO: 2005 - protein, 120 aa, synthetic construct
QVQLVQSGAEVKKPGSSVKVSCKASGYTFTDQTIHWMRQAPGQGLEWIGYIYPSDDSPKYNENFKGKVTITADKSTSTAYMELSSLRSEDTAVYYCAIPDRSGYAWFIYWGQGTLVTVSS

SEQ ID NO: 2006 - protein, 120 aa, synthetic construct
QVQLVQSGAEVKKPGSSVKVSCKASGYTFTDQTIHWMRQAPGQGLEWIGYIYPGDDSPKYNENFKGKVTITADKSTSTAYMELSSLRSEDTAVYYCAIPDRSGYAWFIYWGQGTLVTVSS

SEQ ID NO: 2007 - protein, 120 aa, synthetic construct
QVQLVQSGAEVKKPGSSVKVSCKASGYTFTDQTIHWMRQAPGQGLEWIGYIYPRGDSPKYNENFKGKVTITADKSTSTAYMELSSLRSEDTAVYYCAIPDRSGYAWFIYWGQGTLVTVSS

SEQ ID NO: 2008 - protein, 120 aa, synthetic construct
QVQLVQSGAEVKKPGSSVKVSCKASGYTFTDQTIHWMRQAPGQGLEWIGYIYPRHDSPKYNENFKGKVTITADKSTSTAYMELSSLRSEDTAVYYCAIPDRSGYAWFIYWGQGTLVTVSS

SEQ ID NO: 2009 - protein, 120 aa, synthetic construct
QVQLVQSGAEVKKPGSSVKVSCKASGYTFTDQTIHWMRQAPGQGLEWIGYIYPRSDSPKYNENFKGKVTITADKSTSTAYMELSSLRSEDTAVYYCAIPDRSGYAWFIYWGQGTLVTVSS

SEQ ID NO: 2010 - protein, 120 aa, synthetic construct
QVQLVQSGAEVKKPGSSVKVSCKASGYTFTDQTIHWMRQAPGQGLEWIGYIYPRRDSPKYNENFKGKVTITADKSTSTAYMELSSLRSEDTAVYYCAIPDRSGYAWFIYWGQGTLVTVSS

SEQ ID NO: 2011 - protein, 120 aa, synthetic construct
QVQLVQSGAEVKKPGSSVKVSCKASGYTFTDQTIHWMRQAPGQGLEWIGYIYPRLDSPKYNENFKGKVTITADKSTSTAYMELSSLRSEDTAVYYCAIPDRSGYAWFIYWGQGTLVTVSS

SEQ ID NO: 2012 - protein, 120 aa, synthetic construct
QVQLVQSGAEVKKPGSSVKVSCKASGYTFTDQTIHWMRQAPGQGLEWIGYIYPRDFSPKYNENFKGKVTITADKSTSTAYMELSSLRSEDTAVYYCAIPDRSGYAWFIYWGQGTLVTVSS

SEQ ID NO: 2013 - protein, 120 aa, synthetic construct
QVQLVQSGAEVKKPGSSVKVSCKASGYTFTDQTIHWMRQAPGQGLEWIGYIYPRDHSPKYNENFKGKVTITADKSTSTAYMELSSLRSEDTAVYYCAIPDRSGYAWFIYWGQGTLVTVSS

SEQ ID NO: 2014 - protein, 120 aa, synthetic construct
QVQLVQSGAEVKKPGSSVKVSCKASGYTFTDQTIHWMRQAPGQGLEWIGYIYPRDSSPKYNENFKGKVTITADKSTSTAYMELSSLRSEDTAVYYCAIPDRSGYAWFIYWGQGTLVTVSS

SEQ ID NO: 2015 - protein, 120 aa, synthetic construct
QVQLVQSGAEVKKPGSSVKVSCKASGYTFTDQTIHWMRQAPGQGLEWIGYIYPRDRSPKYNENFKGKVTITADKSTSTAYMELSSLRSEDTAVYYCAIPDRSGYAWFIYWGQGTLVTVSS

SEQ ID NO: 2016 - protein, 120 aa, synthetic construct
QVQLVQSGAEVKKPGSSVKVSCKASGYTFTDQTIHWMRQAPGQGLEWIGYIYPRDLSPKYNENFKGKVTITADKSTSTAYMELSSLRSEDTAVYYCAIPDRSGYAWFIYWGQGTLVTVSS

SEQ ID NO: 2017 - protein, 120 aa, synthetic construct
QVQLVQSGAEVKKPGSSVKVSCKASGYTFTDQTIHWMRQAPGQGLEWIGYIYPRDDAPKYNENFKGKVTITADKSTSTAYMELSSLRSEDTAVYYCAIPDRSGYAWFIYWGQGTLVTVSS

SEQ ID NO: 2018 - protein, 120 aa, synthetic construct
QVQLVQSGAEVKKPGSSVKVSCKASGYTFTDQTIHWMRQAPGQGLEWIGYIYPRDDQPKYNENFKGKVTITADKSTSTAYMELSSLRSEDTAVYYCAIPDRSGYAWFIYWGQGTLVTVSS

SEQ ID NO: 2019 - protein, 120 aa, synthetic construct
QVQLVQSGAEVKKPGSSVKVSCKASGYTFTDQTIHWMRQAPGQGLEWIGYIYPRDDKPKYNENFKGKVTITADKSTSTAYMELSSLRSEDTAVYYCAIPDRSGYAWFIYWGQGTLVTVSS

SEQ ID NO: 2020 - protein, 120 aa, synthetic construct
QVQLVQSGAEVKKPGSSVKVSCKASGYTFTDQTIHWMRQAPGQGLEWIGYIYPRDDVPKYNENFKGKVTITADKSTSTAYMELSSLRSEDTAVYYCAIPDRSGYAWFIYWGQGTLVTVSS

SEQ ID NO: 2021 - protein, 120 aa, synthetic construct
QVQLVQSGAEVKKPGSSVKVSCKASGYTFTDQTIHWMRQAPGQGLEWIGYIYPRDDHPKYNENFKGKVTITADKSTSTAYMELSSLRSEDTAVYYCAIPDRSGYAWFIYWGQGTLVTVSS

SEQ ID NO: 2022 - protein, 120 aa, synthetic construct
QVQLVQSGAEVKKPGSSVKVSCKASGYTFTDQTIHWMRQAPGQGLEWIGYIYPRDDSSKYNENFKGKVTITADKSTSTAYMELSSLRSEDTAVYYCAIPDRSGYAWFIYWGQGTLVTVSS

SEQ ID NO: 2023 - protein, 120 aa, synthetic construct
QVQLVQSGAEVKKPGSSVKVSCKASGYTFTDQTIHWMRQAPGQGLEWIGYIYPRDDSLKYNENFKGKVTITADKSTSTAYMELSSLRSEDTAVYYCAIPDRSGYAWFIYWGQGTLVTVSS

SEQ ID NO: 2024 - protein, 120 aa, synthetic construct
QVQLVQSGAEVKKPGSSVKVSCKASGYTFTDQTIHWMRQAPGQGLEWIGYIYPRDDSAKYNENFKGKVTITADKSTSTAYMELSSLRSEDTAVYYCAIPDRSGYAWFIYWGQGTLVTVSS

SEQ ID NO: 2025 - protein, 120 aa, synthetic construct
QVQLVQSGAEVKKPGSSVKVSCKASGYTFTDQTIHWMRQAPGQGLEWIGYIYPRDDSQKYNENFKGKVTITADKSTSTAYMELSSLRSEDTAVYYCAIPDRSGYAWFIYWGQGTLVTVSS

SEQ ID NO: 2026 - protein, 120 aa, synthetic construct
QVQLVQSGAEVKKPGSSVKVSCKASGYTFTDQTIHWMRQAPGQGLEWIGYIYPRDDSHKYNENFKGKVTITADKSTSTAYMELSSLRSEDTAVYYCAIPDRSGYAWFIYWGQGTLVTVSS

SEQ ID NO: 2027 - protein, 120 aa, synthetic construct
QVQLVQSGAEVKKPGSSVKVSCKASGYTFTDQTIHWMRQAPGQGLEWIGYIYPRDDSPRYNENFKGKVTITADKSTSTAYMELSSLRSEDTAVYYCAIPDRSGYAWFIYWGQGTLVTVSS

SEQ ID NO: 2028 - protein, 120 aa, synthetic construct
QVQLVQSGAEVKKPGSSVKVSCKASGYTFTDQTIHWMRQAPGQGLEWIGYIYPRDDSPEYNENFKGKVTITADKSTSTAYMELSSLRSEDTAVYYCAIPDRSGYAWFIYWGQGTLVTVSS

SEQ ID NO: 2029 - protein, 120 aa, synthetic construct
QVQLVQSGAEVKKPGSSVKVSCKASGYTFTDQTIHWMRQAPGQGLEWIGYIYPRDDSPHYNENFKGKVTITADKSTSTAYMELSSLRSEDTAVYYCAIPDRSGYAWFIYWGQGTLVTVSS

SEQ ID NO: 2030 - protein, 120 aa, synthetic construct
QVQLVQSGAEVKKPGSSVKVSCKASGYTFTDQTIHWMRQAPGQGLEWIGYIYPRDDSPSYNENFKGKVTITADKSTSTAYMELSSLRSEDTAVYYCAIPDRSGYAWFIYWGQGTLVTVSS

SEQ ID NO: 2031 - protein, 120 aa, synthetic construct
QVQLVQSGAEVKKPGSSVKVSCKASGYTFTDQTIHWMRQAPGQGLEWIGYIYPRDDSPAYNENFKGKVTITADKSTSTAYMELSSLRSEDTAVYYCAIPDRSGYAWFIYWGQGTLVTVSS

SEQ ID NO: 2032 - protein, 120 aa, synthetic construct
QVQLVQSGAEVKKPGSSVKVSCKASGYTFTDQTIHWMRQAPGQGLEWIGYIYPRDDSPKYDENFKGKVTITADKSTSTAYMELSSLRSEDTAVYYCAIPDRSGYAWFIYWGQGTLVTVSS

SEQ ID NO: 2033 - protein, 120 aa, synthetic construct
QVQLVQSGAEVKKPGSSVKVSCKASGYTFTDQTIHWMRQAPGQGLEWIGYIYPRDDSPKYHENFKGKVTITADKSTSTAYMELSSLRSEDTAVYYCAIPDRSGYAWFIYWGQGTLVTVSS

SEQ ID NO: 2034 - protein, 120 aa, synthetic construct
QVQLVQSGAEVKKPGSSVKVSCKASGYTFTDQTIHWMRQAPGQGLEWIGYIYPRDDSPKYSENFKGKVTITADKSTSTAYMELSSLRSEDTAVYYCAIPDRSGYAWFIYWGQGTLVTVSS

SEQ ID NO: 2035 - protein, 120 aa, synthetic construct
QVQLVQSGAEVKKPGSSVKVSCKASGYTFTDQTIHWMRQAPGQGLEWIGYIYPRDDSPKYRENFKGKVTITADKSTSTAYMELSSLRSEDTAVYYCAIPDRSGYAWFIYWGQGTLVTVSS

SEQ ID NO: 2036 - protein, 120 aa, synthetic construct
QVQLVQSGAEVKKPGSSVKVSCKASGYTFTDQTIHWMRQAPGQGLEWIGYIYPRDDSPKYLENFKGKVTITADKSTSTAYMELSSLRSEDTAVYYCAIPDRSGYAWFIYWGQGTLVTVSS

SEQ ID NO: 2037 - protein, 120 aa, synthetic construct
QVQLVQSGAEVKKPGSSVKVSCKASGYTFTDQTIHWMRQAPGQGLEWIGYIYPRDDSPKYNQNFKGKVTITADKSTSTAYMELSSLRSEDTAVYYCAIPDRSGYAWFIYWGQGTLVTVSS

SEQ ID NO: 2038 - protein, 120 aa, synthetic construct
QVQLVQSGAEVKKPGSSVKVSCKASGYTFTDQTIHWMRQAPGQGLEWIGYIYPRDDSPKYNKNFKGKVTITADKSTSTAYMELSSLRSEDTAVYYCAIPDRSGYAWFIYWGQGTLVTVSS

SEQ ID NO: 2039 - protein, 120 aa, synthetic construct
QVQLVQSGAEVKKPGSSVKVSCKASGYTFTDQTIHWMRQAPGQGLEWIGYIYPRDDSPKYNINFKGKVTITADKSTSTAYMELSSLRSEDTAVYYCAIPDRSGYAWFIYWGQGTLVTVSS

SEQ ID NO: 2040 - protein, 120 aa, synthetic construct
QVQLVQSGAEVKKPGSSVKVSCKASGYTFTDQTIHWMRQAPGQGLEWIGYIYPRDDSPKYNHNFKGKVTITADKSTSTAYMELSSLRSEDTAVYYCAIPDRSGYAWFIYWGQGTLVTVSS

SEQ ID NO: 2041 - protein, 120 aa, synthetic construct
QVQLVQSGAEVKKPGSSVKVSCKASGYTFTDQTIHWMRQAPGQGLEWIGYIYPRDDSPKYNANFKGKVTITADKSTSTAYMELSSLRSEDTAVYYCAIPDRSGYAWFIYWGQGTLVTVSS

SEQ ID NO: 2042 - protein, 120 aa, synthetic construct
QVQLVQSGAEVKKPGSSVKVSCKASGYTFTDQTIHWMRQAPGQGLEWIGYIYPRDDSPKYNEDFKGKVTITADKSTSTAYMELSSLRSEDTAVYYCAIPDRSGYAWFIYWGQGTLVTVSS

SEQ ID NO: 2043 - protein, 120 aa, synthetic construct
QVQLVQSGAEVKKPGSSVKVSCKASGYTFTDQTIHWMRQAPGQGLEWIGYIYPRDDSPKYNEHFKGKVTITADKSTSTAYMELSSLRSEDTAVYYCAIPDRSGYAWFIYWGQGTLVTVSS

SEQ ID NO: 2044 - protein, 120 aa, synthetic construct
QVQLVQSGAEVKKPGSSVKVSCKASGYTFTDQTIHWMRQAPGQGLEWIGYIYPRDDSPKYNEAFKGKVTITADKSTSTAYMELSSLRSEDTAVYYCAIPDRSGYAWFIYWGQGTLVTVSS

SEQ ID NO: 2045 - protein, 120 aa, synthetic construct
QVQLVQSGAEVKKPGSSVKVSCKASGYTFTDQTIHWMRQAPGQGLEWIGYIYPRDDSPKYNERFKGKVTITADKSTSTAYMELSSLRSEDTAVYYCAIPDRSGYAWFIYWGQGTLVTVSS

SEQ ID NO: 2046 - protein, 120 aa, synthetic construct
QVQLVQSGAEVKKPGSSVKVSCKASGYTFTDQTIHWMRQAPGQGLEWIGYIYPRDDSPKYNELFKGKVTITADKSTSTAYMELSSLRSEDTAVYYCAIPDRSGYAWFIYWGQGTLVTVSS

SEQ ID NO: 2047 - protein, 120 aa, synthetic construct
QVQLVQSGAEVKKPGSSVKVSCKASGYTFTDQTIHWMRQAPGQGLEWIGYIYPRDDSPKYNENLKGKVTITADKSTSTAYMELSSLRSEDTAVYYCAIPDRSGYAWFIYWGQGTLVTVSS

SEQ ID NO: 2048 - protein, 120 aa, synthetic construct
QVQLVQSGAEVKKPGSSVKVSCKASGYTFTDQTIHWMRQAPGQGLEWIGYIYPRDDSPKYNENWKGKVTITADKSTSTAYMELSSLRSEDTAVYYCAIPDRSGYAWFIYWGQGTLVTVSS

SEQ ID NO: 2049 - protein, 120 aa, synthetic construct
QVQLVQSGAEVKKPGSSVKVSCKASGYTFTDQTIHWMRQAPGQGLEWIGYIYPRDDSPKYNENDKGKVTITADKSTSTAYMELSSLRSEDTAVYYCAIPDRSGYAWFIYWGQGTLVTVSS

SEQ ID NO: 2050 - protein, 120 aa, synthetic construct
QVQLVQSGAEVKKPGSSVKVSCKASGYTFTDQTIHWMRQAPGQGLEWIGYIYPRDDSPKYNENHKGKVTITADKSTSTAYMELSSLRSEDTAVYYCAIPDRSGYAWFIYWGQGTLVTVSS

SEQ ID NO: 2051 - protein, 120 aa, synthetic construct
QVQLVQSGAEVKKPGSSVKVSCKASGYTFTDQTIHWMRQAPGQGLEWIGYIYPRDDSPKYNENQKGKVTITADKSTSTAYMELSSLRSEDTAVYYCAIPDRSGYAWFIYWGQGTLVTVSS

SEQ ID NO: 2052 - protein, 120 aa, synthetic construct
QVQLVQSGAEVKKPGSSVKVSCKASGYTFTDQTIHWMRQAPGQGLEWIGYIYPRDDSPKYNENFRGKVTITADKSTSTAYMELSSLRSEDTAVYYCAIPDRSGYAWFIYWGQGTLVTVSS

SEQ ID NO: 2053 - protein, 120 aa, synthetic construct
QVQLVQSGAEVKKPGSSVKVSCKASGYTFTDQTIHWMRQAPGQGLEWIGYIYPRDDSPKYNENFEGKVTITADKSTSTAYMELSSLRSEDTAVYYCAIPDRSGYAWFIYWGQGTLVTVSS

SEQ ID NO: 2054 - protein, 120 aa, synthetic construct
QVQLVQSGAEVKKPGSSVKVSCKASGYTFTDQTIHWMRQAPGQGLEWIGYIYPRDDSPKYNENFHGKVTITADKSTSTAYMELSSLRSEDTAVYYCAIPDRSGYAWFIYWGQGTLVTVSS

SEQ ID NO: 2055 - protein, 120 aa, synthetic construct
QVQLVQSGAEVKKPGSSVKVSCKASGYTFTDQTIHWMRQAPGQGLEWIGYIYPRDDSPKYNENFIGKVTITADKSTSTAYMELSSLRSEDTAVYYCAIPDRSGYAWFIYWGQGTLVTVSS

SEQ ID NO: 2056 - protein, 120 aa, synthetic construct
QVQLVQSGAEVKKPGSSVKVSCKASGYTFTDQTIHWMRQAPGQGLEWIGYIYPRDDSPKYNENFAGKVTITADKSTSTAYMELSSLRSEDTAVYYCAIPDRSGYAWFIYWGQGTLVTVSS

SEQ ID NO: 2057 - protein, 120 aa, synthetic construct
QVQLVQSGAEVKKPGSSVKVSCKASGYTFTDQTIHWMRQAPGQGLEWIGYIYPRDDSPKYNENFKGKVTITSDKSTSTAYMELSSLRSEDTAVYYCAIPDRSGYAWFIYWGQGTLVTVSS

SEQ ID NO: 2058 - protein, 120 aa, synthetic construct
QVQLVQSGAEVKKPGSSVKVSCKASGYTFTDQTIHWMRQAPGQGLEWIGYIYPRDDSPKYNENFKGKVTITGDKSTSTAYMELSSLRSEDTAVYYCAIPDRSGYAWFIYWGQGTLVTVSS

SEQ ID NO: 2059 - protein, 120 aa, synthetic construct
QVQLVQSGAEVKKPGSSVKVSCKASGYTFTDQTIHWMRQAPGQGLEWIGYIYPRDDSPKYNENFKGKVTITHDKSTSTAYMELSSLRSEDTAVYYCAIPDRSGYAWFIYWGQGTLVTVSS

SEQ ID NO: 2060 - protein, 120 aa, synthetic construct
QVQLVQSGAEVKKPGSSVKVSCKASGYTFTDQTIHWMRQAPGQGLEWIGYIYPRDDSPKYNENFKGKVTITQDKSTSTAYMELSSLRSEDTAVYYCAIPDRSGYAWFIYWGQGTLVTVSS

SEQ ID NO: 2061 - protein, 120 aa, synthetic construct
QVQLVQSGAEVKKPGSSVKVSCKASGYTFTDQTIHWMRQAPGQGLEWIGYIYPRDDSPKYNENFKGKVTITDDKSTSTAYMELSSLRSEDTAVYYCAIPDRSGYAWFIYWGQGTLVTVSS

SEQ ID NO: 2062 - protein, 120 aa, synthetic construct
QVQLVQSGAEVKKPGSSVKVSCKASGYTFTDQTIHWMRQAPGQGLEWIGYIYPRDDSPKYNENFKGKVTITADESTSTAYMELSSLRSEDTAVYYCAIPDRSGYAWFIYWGQGTLVTVSS

SEQ ID NO: 2063 - protein, 120 aa, synthetic construct
QVQLVQSGAEVKKPGSSVKVSCKASGYTFTDQTIHWMRQAPGQGLEWIGYIYPRDDSPKYNENFKGKVTITADDSTSTAYMELSSLRSEDTAVYYCAIPDRSGYAWFIYWGQGTLVTVSS

SEQ ID NO: 2064 - protein, 120 aa, synthetic construct
QVQLVQSGAEVKKPGSSVKVSCKASGYTFTDQTIHWMRQAPGQGLEWIGYIYPRDDSPKYNENFKGKVTITADHSTSTAYMELSSLRSEDTAVYYCAIPDRSGYAWFIYWGQGTLVTVSS

SEQ ID NO: 2065 - protein, 120 aa, synthetic construct
QVQLVQSGAEVKKPGSSVKVSCKASGYTFTDQTIHWMRQAPGQGLEWIGYIYPRDDSPKYNENFKGKVTITADSSTSTAYMELSSLRSEDTAVYYCAIPDRSGYAWFIYWGQGTLVTVSS

SEQ ID NO: 2066 - protein, 120 aa, synthetic construct
QVQLVQSGAEVKKPGSSVKVSCKASGYTFTDQTIHWMRQAPGQGLEWIGYIYPRDDSPKYNENFKGKVTITADISTSTAYMELSSLRSEDTAVYYCAIPDRSGYAWFIYWGQGTLVTVSS

SEQ ID NO: 2067 - protein, 120 aa, synthetic construct
QVQLVQSGAEVKKPGSSVKVSCKASGYTFTDQTIHWMRQAPGQGLEWIGYIYPRDDSPKYNENFKGKVTITADKSTSTSYMELSSLRSEDTAVYYCAIPDRSGYAWFIYWGQGTLVTVSS

SEQ ID NO: 2068 - protein, 120 aa, synthetic construct
QVQLVQSGAEVKKPGSSVKVSCKASGYTFTDQTIHWMRQAPGQGLEWIGYIYPRDDSPKYNENFKGKVTITADKSTSTGYMELSSLRSEDTAVYYCAIPDRSGYAWFIYWGQGTLVTVSS

SEQ ID NO: 2069 - protein, 120 aa, synthetic construct
QVQLVQSGAEVKKPGSSVKVSCKASGYTFTDQTIHWMRQAPGQGLEWIGYIYPRDDSPKYNENFKGKVTITADKSTSTHYMELSSLRSEDTAVYYCAIPDRSGYAWFIYWGQGTLVTVSS

SEQ ID NO: 2070 - protein, 120 aa, synthetic construct
QVQLVQSGAEVKKPGSSVKVSCKASGYTFTDQTIHWMRQAPGQGLEWIGYIYPRDDSPKYNENFKGKVTITADKSTSTQYMELSSLRSEDTAVYYCAIPDRSGYAWFIYWGQGTLVTVSS

SEQ ID NO: 2071 - protein, 120 aa, synthetic construct
QVQLVQSGAEVKKPGSSVKVSCKASGYTFTDQTIHWMRQAPGQGLEWIGYIYPRDDSPKYNENFKGKVTITADKSTSTLYMELSSLRSEDTAVYYCAIPDRSGYAWFIYWGQGTLVTVSS

SEQ ID NO: 2072 - protein, 120 aa, synthetic construct
QVQLVQSGAEVKKPGSSVKVSCKASGYTFTDQTIHWMRQAPGQGLEWIGYIYPRDDSPKYNENFKGKVTITADKSTSTAYMELSSLRSEDTAVYYCAVPDRSGYAWFIYWGQGTLVTVSS

SEQ ID NO: 2073 - protein, 120 aa, synthetic construct
QVQLVQSGAEVKKPGSSVKVSCKASGYTFTDQTIHWMRQAPGQGLEWIGYIYPRDDSPKYNENFKGKVTITADKSTSTAYMELSSLRSEDTAVYYCAFPDRSGYAWFIYWGQGTLVTVSS

SEQ ID NO: 2074 - protein, 120 aa, synthetic construct
QVQLVQSGAEVKKPGSSVKVSCKASGYTFTDQTIHWMRQAPGQGLEWIGYIYPRDDSPKYNENFKGKVTITADKSTSTAYMELSSLRSEDTAVYYCATPDRSGYAWFIYWGQGTLVTVSS

SEQ ID NO: 2075 - protein, 120 aa, synthetic construct
QVQLVQSGAEVKKPGSSVKVSCKASGYTFTDQTIHWMRQAPGQGLEWIGYIYPRDDSPKYNENFKGKVTITADKSTSTAYMELSSLRSEDTAVYYCAWPDRSGYAWFIYWGQGTLVTVSS

SEQ ID NO: 2076 - protein, 120 aa, synthetic construct
QVQLVQSGAEVKKPGSSVKVSCKASGYTFTDQTIHWMRQAPGQGLEWIGYIYPRDDSPKYNENFKGKVTITADKSTSTAYMELSSLRSEDTAVYYCAAPDRSGYAWFIYWGQGTLVTVSS

SEQ ID NO: 2077 - protein, 120 aa, synthetic construct
QVQLVQSGAEVKKPGSSVKVSCKASGYTFTDQTIHWMRQAPGQGLEWIGYIYPRDDSPKYNENFKGKVTITADKSTSTAYMELSSLRSEDTAVYYCAISDRSGYAWFIYWGQGTLVTVSS

SEQ ID NO: 2078 - protein, 120 aa, synthetic construct
QVQLVQSGAEVKKPGSSVKVSCKASGYTFTDQTIHWMRQAPGQGLEWIGYIYPRDDSPKYNENFKGKVTITADKSTSTAYMELSSLRSEDTAVYYCAILDRSGYAWFIYWGQGTLVTVSS

SEQ ID NO: 2079 - protein, 120 aa, synthetic construct
QVQLVQSGAEVKKPGSSVKVSCKASGYTFTDQTIHWMRQAPGQGLEWIGYIYPRDDSPKYNENFKGKVTITADKSTSTAYMELSSLRSEDTAVYYCAIADRSGYAWFIYWGQGTLVTVSS

SEQ ID NO: 2080 - protein, 120 aa, synthetic construct
QVQLVQSGAEVKKPGSSVKVSCKASGYTFTDQTIHWMRQAPGQGLEWIGYIYPRDDSPKYNENFKGKVTITADKSTSTAYMELSSLRSEDTAVYYCAIQDRSGYAWFIYWGQGTLVTVSS

SEQ ID NO: 2081 - protein, 120 aa, synthetic construct
QVQLVQSGAEVKKPGSSVKVSCKASGYTFTDQTIHWMRQAPGQGLEWIGYIYPRDDSPKYNENFKGKVTITADKSTSTAYMELSSLRSEDTAVYYCAIHDRSGYAWFIYWGQGTLVTVSS

SEQ ID NO: 2082 - protein, 120 aa, synthetic construct
QVQLVQSGAEVKKPGSSVKVSCKASGYTFTDQTIHWMRQAPGQGLEWIGYIYPRDDSPKYNENFKGKVTITADKSTSTAYMELSSLRSEDTAVYYCAIPVRSGYAWFIYWGQGTLVTVSS

SEQ ID NO: 2083 - protein, 120 aa, synthetic construct
QVQLVQSGAEVKKPGSSVKVSCKASGYTFTDQTIHWMRQAPGQGLEWIGYIYPRDDSPKYNENFKGKVTITADKSTSTAYMELSSLRSEDTAVYYCAIPHRSGYAWFIYWGQGTLVTVSS

SEQ ID NO: 2084 - protein, 120 aa, synthetic construct
QVQLVQSGAEVKKPGSSVKVSCKASGYTFTDQTIHWMRQAPGQGLEWIGYIYPRDDSPKYNENFKGKVTITADKSTSTAYMELSSLRSEDTAVYYCAIPSRSGYAWFIYWGQGTLVTVSS

SEQ ID NO: 2085 - protein, 120 aa, synthetic construct
QVQLVQSGAEVKKPGSSVKVSCKASGYTFTDQTIHWMRQAPGQGLEWIGYIYPRDDSPKYNENFKGKVTITADKSTSTAYMELSSLRSEDTAVYYCAIPRRSGYAWFIYWGQGTLVTVSS

SEQ ID NO: 2086 - protein, 120 aa, synthetic construct
QVQLVQSGAEVKKPGSSVKVSCKASGYTFTDQTIHWMRQAPGQGLEWIGYIYPRDDSPKYNENFKGKVTITADKSTSTAYMELSSLRSEDTAVYYCAIPLRSGYAWFIYWGQGTLVTVSS

SEQ ID NO: 2087 - protein, 120 aa, synthetic construct
QVQLVQSGAEVKKPGSSVKVSCKASGYTFTDQTIHWMRQAPGQGLEWIGYIYPRDDSPKYNENFKGKVTITADKSTSTAYMELSSLRSEDTAVYYCAIPDKSGYAWFIYWGQGTLVTVSS

SEQ ID NO: 2088 - protein, 120 aa, synthetic construct
QVQLVQSGAEVKKPGSSVKVSCKASGYTFTDQTIHWMRQAPGQGLEWIGYIYPRDDSPKYNENFKGKVTITADKSTSTAYMELSSLRSEDTAVYYCAIPDESGYAWFIYWGQGTLVTVSS

SEQ ID NO: 2089 - protein, 120 aa, synthetic construct
QVQLVQSGAEVKKPGSSVKVSCKASGYTFTDQTIHWMRQAPGQGLEWIGYIYPRDDSPKYNENFKGKVTITADKSTSTAYMELSSLRSEDTAVYYCAIPDHSGYAWFIYWGQGTLVTVSS

SEQ ID NO: 2090 - protein, 120 aa, synthetic construct
QVQLVQSGAEVKKPGSSVKVSCKASGYTFTDQTIHWMRQAPGQGLEWIGYIYPRDDSPKYNENFKGKVTITADKSTSTAYMELSSLRSEDTAVYYCAIPDSSGYAWFIYWGQGTLVTVSS

SEQ ID NO: 2091 - protein, 120 aa, synthetic construct
QVQLVQSGAEVKKPGSSVKVSCKASGYTFTDQTIHWMRQAPGQGLEWIGYIYPRDDSPKYNENFKGKVTITADKSTSTAYMELSSLRSEDTAVYYCAIPDYSGYAWFIYWGQGTLVTVSS

SEQ ID NO: 2092 - protein, 120 aa, synthetic construct
QVQLVQSGAEVKKPGSSVKVSCKASGYTFTDQTIHWMRQAPGQGLEWIGYIYPRDDSPKYNENFKGKVTITADKSTSTAYMELSSLRSEDTAVYYCAIPDRAGYAWFIYWGQGTLVTVSS

SEQ ID NO: 2093 - protein, 120 aa, synthetic construct
QVQLVQSGAEVKKPGSSVKVSCKASGYTFTDQTIHWMRQAPGQGLEWIGYIYPRDDSPKYNENFKGKVTITADKSTSTAYMELSSLRSEDTAVYYCAIPDRKGYAWFIYWGQGTLVTVSS

SEQ ID NO: 2094 - protein, 120 aa, synthetic construct
QVQLVQSGAEVKKPGSSVKVSCKASGYTFTDQTIHWMRQAPGQGLEWIGYIYPRDDSPKYNENFKGKVTITADKSTSTAYMELSSLRSEDTAVYYCAIPDRGGYAWFIYWGQGTLVTVSS

SEQ ID NO: 2095 - protein, 120 aa, synthetic construct
QVQLVQSGAEVKKPGSSVKVSCKASGYTFTDQTIHWMRQAPGQGLEWIGYIYPRDDSPKYNENFKGKVTITADKSTSTAYMELSSLRSEDTAVYYCAIPDRVGYAWFIYWGQGTLVTVSS

SEQ ID NO: 2096 - protein, 120 aa, synthetic construct
QVQLVQSGAEVKKPGSSVKVSCKASGYTFTDQTIHWMRQAPGQGLEWIGYIYPRDDSPKYNENFKGKVTITADKSTSTAYMELSSLRSEDTAVYYCAIPDRHGYAWFIYWGQGTLVTVSS

SEQ ID NO: 2097 - protein, 120 aa, synthetic construct
QVQLVQSGAEVKKPGSSVKVSCKASGYTFTDQTIHWMRQAPGQGLEWIGYIYPRDDSPKYNENFKGKVTITADKSTSTAYMELSSLRSEDTAVYYCAIPDRSAYAWFIYWGQGTLVTVSS

SEQ ID NO: 2098 - protein, 120 aa, synthetic construct
QVQLVQSGAEVKKPGSSVKVSCKASGYTFTDQTIHWMRQAPGQGLEWIGYIYPRDDSPKYNENFKGKVTITADKSTSTAYMELSSLRSEDTAVYYCAIPDRSSYAWFIYWGQGTLVTVSS

SEQ ID NO: 2099 - protein, 120 aa, synthetic construct
QVQLVQSGAEVKKPGSSVKVSCKASGYTFTDQTIHWMRQAPGQGLEWIGYIYPRDDSPKYNENFKGKVTITADKSTSTAYMELSSLRSEDTAVYYCAIPDRSQYAWFIYWGQGTLVTVSS

SEQ ID NO: 2100 - protein, 120 aa, synthetic construct
QVQLVQSGAEVKKPGSSVKVSCKASGYTFTDQTIHWMRQAPGQGLEWIGYIYPRDDSPKYNENFKGKVTITADKSTSTAYMELSSLRSEDTAVYYCAIPDRSHYAWFIYWGQGTLVTVSS

SEQ ID NO: 2101 - protein, 120 aa, synthetic construct
QVQLVQSGAEVKKPGSSVKVSCKASGYTFTDQTIHWMRQAPGQGLEWIGYIYPRDDSPKYNENFKGKVTITADKSTSTAYMELSSLRSEDTAVYYCAIPDRSDYAWFIYWGQGTLVTVSS

SEQ ID NO: 2102 - protein, 120 aa, synthetic construct
QVQLVQSGAEVKKPGSSVKVSCKASGYTFTDQTIHWMRQAPGQGLEWIGYIYPRDDSPKYNENFKGKVTITADKSTSTAYMELSSLRSEDTAVYYCAIPDRSGFAWFIYWGQGTLVTVSS

SEQ ID NO: 2103 - protein, 120 aa, synthetic construct
QVQLVQSGAEVKKPGSSVKVSCKASGYTFTDQTIHWMRQAPGQGLEWIGYIYPRDDSPKYNENFKGKVTITADKSTSTAYMELSSLRSEDTAVYYCAIPDRSGHAWFIYWGQGTLVTVSS

SEQ ID NO: 2104 - protein, 120 aa, synthetic construct
QVQLVQSGAEVKKPGSSVKVSCKASGYTFTDQTIHWMRQAPGQGLEWIGYIYPRDDSPKYNENFKGKVTITADKSTSTAYMELSSLRSEDTAVYYCAIPDRSGLAWFIYWGQGTLVTVSS

SEQ ID NO: 2105 - protein, 120 aa, synthetic construct
QVQLVQSGAEVKKPGSSVKVSCKASGYTFTDQTIHWMRQAPGQGLEWIGYIYPRDDSPKYNENFKGKVTITADKSTSTAYMELSSLRSEDTAVYYCAIPDRSGWAWFIYWGQGTLVTVSS

SEQ ID NO: 2106 - protein, 120 aa, synthetic construct
QVQLVQSGAEVKKPGSSVKVSCKASGYTFTDQTIHWMRQAPGQGLEWIGYIYPRDDSPKYNENFKGKVTITADKSTSTAYMELSSLRSEDTAVYYCAIPDRSGVAWFIYWGQGTLVTVSS

SEQ ID NO: 2107 - protein, 120 aa, synthetic construct
QVQLVQSGAEVKKPGSSVKVSCKASGYTFTDQTIHWMRQAPGQGLEWIGYIYPRDDSPKYNENFKGKVTITADKSTSTAYMELSSLRSEDTAVYYCAIPDRSGAAWFIYWGQGTLVTVSS

SEQ ID NO: 2108 - protein, 120 aa, synthetic construct
QVQLVQSGAEVKKPGSSVKVSCKASGYTFTDQTIHWMRQAPGQGLEWIGYIYPRDDSPKYNENFKGKVTITADKSTSTAYMELSSLRSEDTAVYYCAIPDRSGYSWFIYWGQGTLVTVSS

SEQ ID NO: 2109 - protein, 120 aa, synthetic construct
QVQLVQSGAEVKKPGSSVKVSCKASGYTFTDQTIHWMRQAPGQGLEWIGYIYPRDDSPKYNENFKGKVTITADKSTSTAYMELSSLRSEDTAVYYCAIPDRSGYGWFIYWGQGTLVTVSS

SEQ ID NO: 2110 - protein, 120 aa, synthetic construct
QVQLVQSGAEVKKPGSSVKVSCKASGYTFTDQTIHWMRQAPGQGLEWIGYIYPRDDSPKYNENFKGKVTITADKSTSTAYMELSSLRSEDTAVYYCAIPDRSGYHWFIYWGQGTLVTVSS

SEQ ID NO: 2111 - protein, 120 aa, synthetic construct
QVQLVQSGAEVKKPGSSVKVSCKASGYTFTDQTIHWMRQAPGQGLEWIGYIYPRDDSPKYNENFKGKVTITADKSTSTAYMELSSLRSEDTAVYYCAIPDRSGYQWFIYWGQGTLVTVSS

SEQ ID NO: 2112 - protein, 120 aa, synthetic construct
QVQLVQSGAEVKKPGSSVKVSCKASGYTFTDQTIHWMRQAPGQGLEWIGYIYPRDDSPKYNENFKGKVTITADKSTSTAYMELSSLRSEDTAVYYCAIPDRSGYDWFIYWGQGTLVTVSS

SEQ ID NO: 2113 - protein, 120 aa, synthetic construct
QVQLVQSGAEVKKPGSSVKVSCKASGYTFTDQTIHWMRQAPGQGLEWIGYIYPRDDSPKYNENFKGKVTITADKSTSTAYMELSSLRSEDTAVYYCAIPDRSGYAFFIYWGQGTLVTVSS

SEQ ID NO: 2114 - protein, 120 aa, synthetic construct
QVQLVQSGAEVKKPGSSVKVSCKASGYTFTDQTIHWMRQAPGQGLEWIGYIYPRDDSPKYNENFKGKVTITADKSTSTAYMELSSLRSEDTAVYYCAIPDRSGYALFIYWGQGTLVTVSS

SEQ ID NO: 2115 - protein, 120 aa, synthetic construct
QVQLVQSGAEVKKPGSSVKVSCKASGYTFTDQTIHWMRQAPGQGLEWIGYIYPRDDSPKYNENFKGKVTITADKSTSTAYMELSSLRSEDTAVYYCAIPDRSGYAHFIYWGQGTLVTVSS

SEQ ID NO: 2116 - protein, 120 aa, synthetic construct
QVQLVQSGAEVKKPGSSVKVSCKASGYTFTDQTIHWMRQAPGQGLEWIGYIYPRDDSPKYNENFKGKVTITADKSTSTAYMELSSLRSEDTAVYYCAIPDRSGYAQFIYWGQGTLVTVSS

SEQ ID NO: 2117 - protein, 120 aa, synthetic construct
QVQLVQSGAEVKKPGSSVKVSCKASGYTFTDQTIHWMRQAPGQGLEWIGYIYPRDDSPKYNENFKGKVTITADKSTSTAYMELSSLRSEDTAVYYCAIPDRSGYASFIYWGQGTLVTVSS

SEQ ID NO: 2118 - protein, 120 aa, synthetic construct
QVQLVQSGAEVKKPGSSVKVSCKASGYTFTDQTIHWMRQAPGQGLEWIGYIYPRDDSPKYNENFKGKVTITADKSTSTAYMELSSLRSEDTAVYYCAIPDRSGYAWLIYWGQGTLVTVSS

SEQ ID NO: 2119 - protein, 120 aa, synthetic construct
QVQLVQSGAEVKKPGSSVKVSCKASGYTFTDQTIHWMRQAPGQGLEWIGYIYPRDDSPKYNENFKGKVTITADKSTSTAYMELSSLRSEDTAVYYCAIPDRSGYAWWIYWGQGTLVTVSS

SEQ ID NO: 2120 - protein, 120 aa, synthetic construct
QVQLVQSGAEVKKPGSSVKVSCKASGYTFTDQTIHWMRQAPGQGLEWIGYIYPRDDSPKYNENFKGKVTITADKSTSTAYMELSSLRSEDTAVYYCAIPDRSGYAWHIYWGQGTLVTVSS

SEQ ID NO: 2121 - protein, 120 aa, synthetic construct
QVQLVQSGAEVKKPGSSVKVSCKASGYTFTDQTIHWMRQAPGQGLEWIGYIYPRDDSPKYNENFKGKVTITADKSTSTAYMELSSLRSEDTAVYYCAIPDRSGYAWQIYWGQGTLVTVSS

SEQ ID NO: 2122 - protein, 120 aa, synthetic construct
QVQLVQSGAEVKKPGSSVKVSCKASGYTFTDQTIHWMRQAPGQGLEWIGYIYPRDDSPKYNENFKGKVTITADKSTSTAYMELSSLRSEDTAVYYCAIPDRSGYAWSIYWGQGTLVTVSS

SEQ ID NO: 2123 - protein, 120 aa, synthetic construct
QVQLVQSGAEVKKPGSSVKVSCKASGYTFTDQTIHWMRQAPGQGLEWIGYIYPRDDSPKYNENFKGKVTITADKSTSTAYMELSSLRSEDTAVYYCAIPDRSGYAWFVYWGQGTLVTVSS

SEQ ID NO: 2124 - protein, 120 aa, synthetic construct
QVQLVQSGAEVKKPGSSVKVSCKASGYTFTDQTIHWMRQAPGQGLEWIGYIYPRDDSPKYNENFKGKVTITADKSTSTAYMELSSLRSEDTAVYYCAIPDRSGYAWFFYWGQGTLVTVSS

SEQ ID NO: 2125 - protein, 120 aa, synthetic construct
QVQLVQSGAEVKKPGSSVKVSCKASGYTFTDQTIHWMRQAPGQGLEWIGYIYPRDDSPKYNENFKGKVTITADKSTSTAYMELSSLRSEDTAVYYCAIPDRSGYAWFTYWGQGTLVTVSS

SEQ ID NO: 2126 - protein, 120 aa, synthetic construct
QVQLVQSGAEVKKPGSSVKVSCKASGYTFTDQTIHWMRQAPGQGLEWIGYIYPRDDSPKYNENFKGKVTITADKSTSTAYMELSSLRSEDTAVYYCAIPDRSGYAWFWYWGQGTLVTVSS

SEQ ID NO: 2127 - protein, 120 aa, synthetic construct
QVQLVQSGAEVKKPGSSVKVSCKASGYTFTDQTIHWMRQAPGQGLEWIGYIYPRDDSPKYNENFKGKVTITADKSTSTAYMELSSLRSEDTAVYYCAIPDRSGYAWFAYWGQGTLVTVSS

SEQ ID NO: 2128 - protein, 120 aa, synthetic construct
QVQLVQSGAEVKKPGSSVKVSCKASGYTFTDQTIHWMRQAPGQGLEWIGYIYPRDDSPKYNENFKGKVTITADKSTSTAYMELSSLRSEDTAVYYCAIPDRSGYAWFIHWGQGTLVTVSS

SEQ ID NO: 2129 - protein, 120 aa, synthetic construct
QVQLVQSGAEVKKPGSSVKVSCKASGYTFTDQTIHWMRQAPGQGLEWIGYIYPRDDSPKYNENFKGKVTITADKSTSTAYMELSSLRSEDTAVYYCAIPDRSGYAWFILWGQGTLVTVSS

SEQ ID NO: 2130 - protein, 120 aa, synthetic construct
QVQLVQSGAEVKKPGSSVKVSCKASGYTFTDQTIHWMRQAPGQGLEWIGYIYPRDDSPKYNENFKGKVTITADKSTSTAYMELSSLRSEDTAVYYCAIPDRSGYAWFIWWGQGTLVTVSS

SEQ ID NO: 2131 - protein, 120 aa, synthetic construct
QVQLVQSGAEVKKPGSSVKVSCKASGYTFTDQTIHWMRQAPGQGLEWIGYIYPRDDSPKYNENFKGKVTITADKSTSTAYMELSSLRSEDTAVYYCAIPDRSGYAWFIAWGQGTLVTVSS

SEQ ID NO: 2132 - protein, 120 aa, synthetic construct
QVQLVQSGAEVKKPGSSVKVSCKASGYTFTDQTIHWMRQAPGQGLEWIGYIYPRDDSPKYNENFKGKVTITADKSTSTAYMELSSLRSEDTAVYYCAIPDRSGYAWFIQWGQGTLVTVSS

SEQ ID NO: 2133 - protein, 107 aa, synthetic construct
DIQMTQSPSSLSASVGDRVTITCKASENVGTYVAWYQQKPGKVPKLLIYWASTRHTGVPSRFSGSGSRTDFTLTISSLQPEDVADYFCHQYSSYPFTFGSGTKLEIK

SEQ ID NO: 2134 - protein, 107 aa, synthetic construct
DIQMTQSPSSLSASVGDRVTITCKASRDVAIAVAWYQQKPGKVPKLLIYGTSTRHTGVPSRFSGSGSRTDFTLTISSLQPEDVADYFCHQYSSYPFTFGSGTKLEIK

SEQ ID NO: 2135 - protein, 107 aa, synthetic construct
DIQMTQSPSSLSASVGDRVTITCKASRDVAIAVAWYQQKPGKVPKLLIYWASTRHTGVPSRFSGSGSRTDFTLTISSLQPEDVADYFCGQSYRYPYTFGSGTKLEIK

SEQ ID NO: 2136 - protein, 107 aa, synthetic construct
DIQMTQSPSSLSASVGDRVTITCKASENVGTYVAWYQQKPGKVPKLLIYGTSTRHTGVPSRFSGSGSRTDFTLTISSLQPEDVADYFCHQYSSYPFTFGSGTKLEIK

SEQ ID NO: 2137 - protein, 107 aa, synthetic construct
DIQMTQSPSSLSASVGDRVTITCKASRDVAIAVAWYQQKPGKVPKLLIYGTSTRHTGVPSRFSGSGSRTDFTLTISSLQPEDVADYFCGQSYRYPYTFGSGTKLEIK

SEQ ID NO: 2138 - protein, 107 aa, synthetic construct
DIQMTQSPSSLSASVGDRVTITCKASENVGTYVAWYQQKPGKVPKLLIYWASTRHTGVPSRFSGSGSRTDFTLTISSLQPEDVADYFCGQSYRYPYTFGSGTKLEIK

SEQ ID NO: 2139 - protein, 107 aa, synthetic construct
DIQMTQSPSSLSASVGDRVTITCKASEDIYSGVAWYQQKPGKVPKLLIYWASTRHTGVPSRFSGSGSRTDFTLTISSLQPEDVADYFCHQGLKSPYTFGSGTKLEIK

SEQ ID NO: 2140 - protein, 107 aa, synthetic construct
DIQMTQSPSSLSASVGDRVTITCKASENVGTYVAWYQQKPGKVPKLLIYGTSTRHTGVPSRFSGSGSRTDFTLTISSLQPEDVADYFCGQSYRYPYTFGSGTKLEIK

SEQ ID NO: 2141 - protein, 107 aa, synthetic construct
DIQMTQSPSSLSASVGDRVTITCKASRNVAIAVAWYQQKPGKVPKLLIYWASTRHTGVPSRFSGSGSRTDFTLTISSLQPEDVADYFCHQYSSYPFTFGSGTKLEIK

SEQ ID NO: 2142 - protein, 107 aa, synthetic construct
DIQMTQSPSSLSASVGDRVTITCKASRHVAIAVAWYQQKPGKVPKLLIYWASTRHTGVPSRFSGSGSRTDFTLTISSLQPEDVADYFCHQYSSYPFTFGSGTKLEIK

SEQ ID NO: 2143 - protein, 107 aa, synthetic construct
DIQMTQSPSSLSASVGDRVTITCKASRSVAIAVAWYQQKPGKVPKLLIYWASTRHTGVPSRFSGSGSRTDFTLTISSLQPEDVADYFCHQYSSYPFTFGSGTKLEIK

SEQ ID NO: 2144 - protein, 107 aa, synthetic construct
DIQMTQSPSSLSASVGDRVTITCKASRRVAIAVAWYQQKPGKVPKLLIYWASTRHTGVPSRFSGSGSRTDFTLTISSLQPEDVADYFCHQYSSYPFTFGSGTKLEIK

SEQ ID NO: 2145 - protein, 107 aa, synthetic construct
DIQMTQSPSSLSASVGDRVTITCKASRLVAIAVAWYQQKPGKVPKLLIYWASTRHTGVPSRFSGSGSRTDFTLTISSLQPEDVADYFCHQYSSYPFTFGSGTKLEIK

SEQ ID NO: 2146 - protein, 107 aa, synthetic construct
DIQMTQSPSSLSASVGDRVTITCKASRDTAIAVAWYQQKPGKVPKLLIYWASTRHTGVPSRFSGSGSRTDFTLTISSLQPEDVADYFCHQYSSYPFTFGSGTKLEIK

SEQ ID NO: 2147 - protein, 107 aa, synthetic construct
DIQMTQSPSSLSASVGDRVTITCKASRDIAIAVAWYQQKPGKVPKLLIYWASTRHTGVPSRFSGSGSRTDFTLTISSLQPEDVADYFCHQYSSYPFTFGSGTKLEIK

SEQ ID NO: 2148 - protein, 107 aa, synthetic construct
DIQMTQSPSSLSASVGDRVTITCKASRDAAIAVAWYQQKPGKVPKLLIYWASTRHTGVPSRFSGSGSRTDFTLTISSLQPEDVADYFCHQYSSYPFTFGSGTKLEIK

SEQ ID NO: 2149 - protein, 107 aa, synthetic construct
DIQMTQSPSSLSASVGDRVTITCKASRDYAIAVAWYQQKPGKVPKLLIYWASTRHTGVPSRFSGSGSRTDFTLTISSLQPEDVADYFCHQYSSYPFTFGSGTKLEIK

SEQ ID NO: 2150 - protein, 107 aa, synthetic construct
DIQMTQSPSSLSASVGDRVTITCKASRDQAIAVAWYQQKPGKVPKLLIYWASTRHTGVPSRFSGSGSRTDFTLTISSLQPEDVADYFCHQYSSYPFTFGSGTKLEIK

SEQ ID NO: 2151 - protein, 107 aa, synthetic construct
DIQMTQSPSSLSASVGDRVTITCKASRDVSIAVAWYQQKPGKVPKLLIYWASTRHTGVPSRFSGSGSRTDFTLTISSLQPEDVADYFCHQYSSYPFTFGSGTKLEIK

SEQ ID NO: 2152 - protein, 107 aa, synthetic construct
DIQMTQSPSSLSASVGDRVTITCKASRDVGIAVAWYQQKPGKVPKLLIYWASTRHTGVPSRFSGSGSRTDFTLTISSLQPEDVADYFCHQYSSYPFTFGSGTKLEIK

SEQ ID NO: 2153 - protein, 107 aa, synthetic construct
DIQMTQSPSSLSASVGDRVTITCKASRDVHIAVAWYQQKPGKVPKLLIYWASTRHTGVPSRFSGSGSRTDFTLTISSLQPEDVADYFCHQYSSYPFTFGSGTKLEIK

SEQ ID NO: 2154 - protein, 107 aa, synthetic construct
DIQMTQSPSSLSASVGDRVTITCKASRDVQIAVAWYQQKPGKVPKLLIYWASTRHTGVPSRFSGSGSRTDFTLTISSLQPEDVADYFCHQYSSYPFTFGSGTKLEIK

SEQ ID NO: 2155 - protein, 107 aa, synthetic construct
DIQMTQSPSSLSASVGDRVTITCKASRDVDIAVAWYQQKPGKVPKLLIYWASTRHTGVPSRFSGSGSRTDFTLTISSLQPEDVADYFCHQYSSYPFTFGSGTKLEIK

SEQ ID NO: 2156 - protein, 107 aa, synthetic construct
DIQMTQSPSSLSASVGDRVTITCKASRDVAVAVAWYQQKPGKVPKLLIYWASTRHTGVPSRFSGSGSRTDFTLTISSLQPEDVADYFCHQYSSYPFTFGSGTKLEIK

SEQ ID NO: 2157 - protein, 107 aa, synthetic construct
DIQMTQSPSSLSASVGDRVTITCKASRDVAFAVAWYQQKPGKVPKLLIYWASTRHTGVPSRFSGSGSRTDFTLTISSLQPEDVADYFCHQYSSYPFTFGSGTKLEIK

SEQ ID NO: 2158 - protein, 107 aa, synthetic construct
DIQMTQSPSSLSASVGDRVTITCKASRDVATAVAWYQQKPGKVPKLLIYWASTRHTGVPSRFSGSGSRTDFTLTISSLQPEDVADYFCHQYSSYPFTFGSGTKLEIK

SEQ ID NO: 2159 - protein, 107 aa, synthetic construct
DIQMTQSPSSLSASVGDRVTITCKASRDVAWAVAWYQQKPGKVPKLLIYWASTRHTGVPSRFSGSGSRTDFTLTISSLQPEDVADYFCHQYSSYPFTFGSGTKLEIK

SEQ ID NO: 2160 - protein, 107 aa, synthetic construct
DIQMTQSPSSLSASVGDRVTITCKASRDVAAAVAWYQQKPGKVPKLLIYWASTRHTGVPSRFSGSGSRTDFTLTISSLQPEDVADYFCHQYSSYPFTFGSGTKLEIK

SEQ ID NO: 2161 - protein, 107 aa, synthetic construct
DIQMTQSPSSLSASVGDRVTITCKASRDVAISVAWYQQKPGKVPKLLIYWASTRHTGVPSRFSGSGSRTDFTLTISSLQPEDVADYFCHQYSSYPFTFGSGTKLEIK

SEQ ID NO: 2162 - protein, 107 aa, synthetic construct
DIQMTQSPSSLSASVGDRVTITCKASRDVAIGVAWYQQKPGKVPKLLIYWASTRHTGVPSRFSGSGSRTDFTLTISSLQPEDVADYFCHQYSSYPFTFGSGTKLEIK

SEQ ID NO: 2163 - protein, 107 aa, synthetic construct
DIQMTQSPSSLSASVGDRVTITCKASRDVAIHVAWYQQKPGKVPKLLIYWASTRHTGVPSRFSGSGSRTDFTLTISSLQPEDVADYFCHQYSSYPFTFGSGTKLEIK

SEQ ID NO: 2164 - protein, 107 aa, synthetic construct
DIQMTQSPSSLSASVGDRVTITCKASRDVAIQVAWYQQKPGKVPKLLIYWASTRHTGVPSRFSGSGSRTDFTLTISSLQPEDVADYFCHQYSSYPFTFGSGTKLEIK

SEQ ID NO: 2165 - protein, 107 aa, synthetic construct
DIQMTQSPSSLSASVGDRVTITCKASRDVAIDVAWYQQKPGKVPKLLIYWASTRHTGVPSRFSGSGSRTDFTLTISSLQPEDVADYFCHQYSSYPFTFGSGTKLEIK

SEQ ID NO: 2166 - protein, 107 aa, synthetic construct
DIQMTQSPSSLSASVGDRVTITCKASRDVAIAVSWYQQKPGKVPKLLIYWASTRHTGVPSRFSGSGSRTDFTLTISSLQPEDVADYFCHQYSSYPFTFGSGTKLEIK

SEQ ID NO: 2167 - protein, 107 aa, synthetic construct
DIQMTQSPSSLSASVGDRVTITCKASRDVAIAVGWYQQKPGKVPKLLIYWASTRHTGVPSRFSGSGSRTDFTLTISSLQPEDVADYFCHQYSSYPFTFGSGTKLEIK

SEQ ID NO: 2168 - protein, 107 aa, synthetic construct
DIQMTQSPSSLSASVGDRVTITCKASRDVAIAVHWYQQKPGKVPKLLIYWASTRHTGVPSRFSGSGSRTDFTLTISSLQPEDVADYFCHQYSSYPFTFGSGTKLEIK

SEQ ID NO: 2169 - protein, 107 aa, synthetic construct
DIQMTQSPSSLSASVGDRVTITCKASRDVAIAVQWYQQKPGKVPKLLIYWASTRHTGVPSRFSGSGSRTDFTLTISSLQPEDVADYFCHQYSSYPFTFGSGTKLEIK

SEQ ID NO: 2170 - protein, 107 aa, synthetic construct
DIQMTQSPSSLSASVGDRVTITCKASRDVAIAVDWYQQKPGKVPKLLIYWASTRHTGVPSRFSGSGSRTDFTLTISSLQPEDVADYFCHQYSSYPFTFGSGTKLEIK

SEQ ID NO: 2171 - protein, 107 aa, synthetic construct
DIQMTQSPSSLSASVGDRVTITCKASRDVAIAVAWYQQKPGKTPKLLIYWASTRHTGVPSRFSGSGSRTDFTLTISSLQPEDVADYFCHQYSSYPFTFGSGTKLEIK

SEQ ID NO: 2172 - protein, 107 aa, synthetic construct
DIQMTQSPSSLSASVGDRVTITCKASRDVAIAVAWYQQKPGKIPKLLIYWASTRHTGVPSRFSGSGSRTDFTLTISSLQPEDVADYFCHQYSSYPFTFGSGTKLEIK

SEQ ID NO: 2173 - protein, 107 aa, synthetic construct
DIQMTQSPSSLSASVGDRVTITCKASRDVAIAVAWYQQKPGKAPKLLIYWASTRHTGVPSRFSGSGSRTDFTLTISSLQPEDVADYFCHQYSSYPFTFGSGTKLEIK

SEQ ID NO: 2174 - protein, 107 aa, synthetic construct
DIQMTQSPSSLSASVGDRVTITCKASRDVAIAVAWYQQKPGKYPKLLIYWASTRHTGVPSRFSGSGSRTDFTLTISSLQPEDVADYFCHQYSSYPFTFGSGTKLEIK

SEQ ID NO: 2175 - protein, 107 aa, synthetic construct
DIQMTQSPSSLSASVGDRVTITCKASRDVAIAVAWYQQKPGKQPKLLIYWASTRHTGVPSRFSGSGSRTDFTLTISSLQPEDVADYFCHQYSSYPFTFGSGTKLEIK

SEQ ID NO: 2176 - protein, 107 aa, synthetic construct
DIQMTQSPSSLSASVGDRVTITCKASRDVAIAVAWYQQKPGKVPKLLIYFASTRHTGVPSRFSGSGSRTDFTLTISSLQPEDVADYFCHQYSSYPFTFGSGTKLEIK

SEQ ID NO: 2177 - protein, 107 aa, synthetic construct
DIQMTQSPSSLSASVGDRVTITCKASRDVAIAVAWYQQKPGKVPKLLIYLASTRHTGVPSRFSGSGSRTDFTLTISSLQPEDVADYFCHQYSSYPFTFGSGTKLEIK

SEQ ID NO: 2178 - protein, 107 aa, synthetic construct
DIQMTQSPSSLSASVGDRVTITCKASRDVAIAVAWYQQKPGKVPKLLIYHASTRHTGVPSRFSGSGSRTDFTLTISSLQPEDVADYFCHQYSSYPFTFGSGTKLEIK

SEQ ID NO: 2179 - protein, 107 aa, synthetic construct
DIQMTQSPSSLSASVGDRVTITCKASRDVAIAVAWYQQKPGKVPKLLIYQASTRHTGVPSRFSGSGSRTDFTLTISSLQPEDVADYFCHQYSSYPFTFGSGTKLEIK

SEQ ID NO: 2180 - protein, 107 aa, synthetic construct
DIQMTQSPSSLSASVGDRVTITCKASRDVAIAVAWYQQKPGKVPKLLIYSASTRHTGVPSRFSGSGSRTDFTLTISSLQPEDVADYFCHQYSSYPFTFGSGTKLEIK

SEQ ID NO: 2181 - protein, 107 aa, synthetic construct
DIQMTQSPSSLSASVGDRVTITCKASRDVAIAVAWYQQKPGKVPKLLIYWSSTRHTGVPSRFSGSGSRTDFTLTISSLQPEDVADYFCHQYSSYPFTFGSGTKLEIK

SEQ ID NO: 2182 - protein, 107 aa, synthetic construct
DIQMTQSPSSLSASVGDRVTITCKASRDVAIAVAWYQQKPGKVPKLLIYWGSTRHTGVPSRFSGSGSRTDFTLTISSLQPEDVADYFCHQYSSYPFTFGSGTKLEIK

SEQ ID NO: 2183 - protein, 107 aa, synthetic construct
DIQMTQSPSSLSASVGDRVTITCKASRDVAIAVAWYQQKPGKVPKLLIYWHSTRHTGVPSRFSGSGSRTDFTLTISSLQPEDVADYFCHQYSSYPFTFGSGTKLEIK

SEQ ID NO: 2184 - protein, 107 aa, synthetic construct
DIQMTQSPSSLSASVGDRVTITCKASRDVAIAVAWYQQKPGKVPKLLIYWQSTRHTGVPSRFSGSGSRTDFTLTISSLQPEDVADYFCHQYSSYPFTFGSGTKLEIK

SEQ ID NO: 2185 - protein, 107 aa, synthetic construct
DIQMTQSPSSLSASVGDRVTITCKASRDVAIAVAWYQQKPGKVPKLLIYWLSTRHTGVPSRFSGSGSRTDFTLTISSLQPEDVADYFCHQYSSYPFTFGSGTKLEIK

SEQ ID NO: 2186 - protein, 107 aa, synthetic construct
DIQMTQSPSSLSASVGDRVTITCKASRDVAIAVAWYQQKPGKVPKLLIYWASVRHTGVPSRFSGSGSRTDFTLTISSLQPEDVADYFCHQYSSYPFTFGSGTKLEIK

SEQ ID NO: 2187 - protein, 107 aa, synthetic construct
DIQMTQSPSSLSASVGDRVTITCKASRDVAIAVAWYQQKPGKVPKLLIYWASARHTGVPSRFSGSGSRTDFTLTISSLQPEDVADYFCHQYSSYPFTFGSGTKLEIK

SEQ ID NO: 2188 - protein, 107 aa, synthetic construct
DIQMTQSPSSLSASVGDRVTITCKASRDVAIAVAWYQQKPGKVPKLLIYWASQRHTGVPSRFSGSGSRTDFTLTISSLQPEDVADYFCHQYSSYPFTFGSGTKLEIK

SEQ ID NO: 2189 - protein, 107 aa, synthetic construct
DIQMTQSPSSLSASVGDRVTITCKASRDVAIAVAWYQQKPGKVPKLLIYWASHRHTGVPSRFSGSGSRTDFTLTISSLQPEDVADYFCHQYSSYPFTFGSGTKLEIK

SEQ ID NO: 2190 - protein, 107 aa, synthetic construct
DIQMTQSPSSLSASVGDRVTITCKASRDVAIAVAWYQQKPGKVPKLLIYWASDRHTGVPSRFSGSGSRTDFTLTISSLQPEDVADYFCHQYSSYPFTFGSGTKLEIK

SEQ ID NO: 2191 - protein, 107 aa, synthetic construct
DIQMTQSPSSLSASVGDRVTITCKASRDVAIAVAWYQQKPGKVPKLLIYWASTRYTGVPSRFSGSGSRTDFTLTISSLQPEDVADYFCHQYSSYPFTFGSGTKLEIK

SEQ ID NO: 2192 - protein, 107 aa, synthetic construct
DIQMTQSPSSLSASVGDRVTITCKASRDVAIAVAWYQQKPGKVPKLLIYWASTRQTGVPSRFSGSGSRTDFTLTISSLQPEDVADYFCHQYSSYPFTFGSGTKLEIK

SEQ ID NO: 2193 - protein, 107 aa, synthetic construct
DIQMTQSPSSLSASVGDRVTITCKASRDVAIAVAWYQQKPGKVPKLLIYWASTRDTGVPSRFSGSGSRTDFTLTISSLQPEDVADYFCHQYSSYPFTFGSGTKLEIK

SEQ ID NO: 2194 - protein, 107 aa, synthetic construct
DIQMTQSPSSLSASVGDRVTITCKASRDVAIAVAWYQQKPGKVPKLLIYWASTRATGVPSRFSGSGSRTDFTLTISSLQPEDVADYFCHQYSSYPFTFGSGTKLEIK

SEQ ID NO: 2195 - protein, 107 aa, synthetic construct
DIQMTQSPSSLSASVGDRVTITCKASRDVAIAVAWYQQKPGKVPKLLIYWASTRTTGVPSRFSGSGSRTDFTLTISSLQPEDVADYFCHQYSSYPFTFGSGTKLEIK

SEQ ID NO: 2196 - protein, 107 aa, synthetic construct
DIQMTQSPSSLSASVGDRVTITCKASRDVAIAVAWYQQKPGKVPKLLIYWASTRHTGVPSRFSGSGSRTDFTLTISSLQPEDVADYFCYQYSSYPFTFGSGTKLEIK

SEQ ID NO: 2197 - protein, 107 aa, synthetic construct
DIQMTQSPSSLSASVGDRVTITCKASRDVAIAVAWYQQKPGKVPKLLIYWASTRHTGVPSRFSGSGSRTDFTLTISSLQPEDVADYFCQQYSSYPFTFGSGTKLEIK

SEQ ID NO: 2198 - protein, 107 aa, synthetic construct
DIQMTQSPSSLSASVGDRVTITCKASRDVAIAVAWYQQKPGKVPKLLIYWASTRHTGVPSRFSGSGSRTDFTLTISSLQPEDVADYFCDQYSSYPFTFGSGTKLEIK

SEQ ID NO: 2199 - protein, 107 aa, synthetic construct
DIQMTQSPSSLSASVGDRVTITCKASRDVAIAVAWYQQKPGKVPKLLIYWASTRHTGVPSRFSGSGSRTDFTLTISSLQPEDVADYFCTQYSSYPFTFGSGTKLEIK

SEQ ID NO: 2200 - protein, 107 aa, synthetic construct
DIQMTQSPSSLSASVGDRVTITCKASRDVAIAVAWYQQKPGKVPKLLIYWASTRHTGVPSRFSGSGSRTDFTLTISSLQPEDVADYFCAQYSSYPFTFGSGTKLEIK

SEQ ID NO: 2201 - protein, 107 aa, synthetic construct
DIQMTQSPSSLSASVGDRVTITCKASRDVAIAVAWYQQKPGKVPKLLIYWASTRHTGVPSRFSGSGSRTDFTLTISSLQPEDVADYFCHQHSSYPFTFGSGTKLEIK

SEQ ID NO: 2202 - protein, 107 aa, synthetic construct
DIQMTQSPSSLSASVGDRVTITCKASRDVAIAVAWYQQKPGKVPKLLIYWASTRHTGVPSRFSGSGSRTDFTLTISSLQPEDVADYFCHQLSSYPFTFGSGTKLEIK

SEQ ID NO: 2203 - protein, 107 aa, synthetic construct
DIQMTQSPSSLSASVGDRVTITCKASRDVAIAVAWYQQKPGKVPKLLIYWASTRHTGVPSRFSGSGSRTDFTLTISSLQPEDVADYFCHQWSSYPFTFGSGTKLEIK

SEQ ID NO: 2204 - protein, 107 aa, synthetic construct
DIQMTQSPSSLSASVGDRVTITCKASRDVAIAVAWYQQKPGKVPKLLIYWASTRHTGVPSRFSGSGSRTDFTLTISSLQPEDVADYFCHQASSYPFTFGSGTKLEIK

SEQ ID NO: 2205 - protein, 107 aa, synthetic construct
DIQMTQSPSSLSASVGDRVTITCKASRDVAIAVAWYQQKPGKVPKLLIYWASTRHTGVPSRFSGSGSRTDFTLTISSLQPEDVADYFCHQQSSYPFTFGSGTKLEIK

SEQ ID NO: 2206 - protein, 107 aa, synthetic construct
DIQMTQSPSSLSASVGDRVTITCKASRDVAIAVAWYQQKPGKVPKLLIYWASTRHTGVPSRFSGSGSRTDFTLTISSLQPEDVADYFCHQYASYPFTFGSGTKLEIK

SEQ ID NO: 2207 - protein, 107 aa, synthetic construct
DIQMTQSPSSLSASVGDRVTITCKASRDVAIAVAWYQQKPGKVPKLLIYWASTRHTGVPSRFSGSGSRTDFTLTISSLQPEDVADYFCHQYQSYPFTFGSGTKLEIK

SEQ ID NO: 2208 - protein, 107 aa, synthetic construct
DIQMTQSPSSLSASVGDRVTITCKASRDVAIAVAWYQQKPGKVPKLLIYWASTRHTGVPSRFSGSGSRTDFTLTISSLQPEDVADYFCHQYGSYPFTFGSGTKLEIK

SEQ ID NO: 2209 - protein, 107 aa, synthetic construct
DIQMTQSPSSLSASVGDRVTITCKASRDVAIAVAWYQQKPGKVPKLLIYWASTRHTGVPSRFSGSGSRTDFTLTISSLQPEDVADYFCHQYVSYPFTFGSGTKLEIK

SEQ ID NO: 2210 - protein, 107 aa, synthetic construct
DIQMTQSPSSLSASVGDRVTITCKASRDVAIAVAWYQQKPGKVPKLLIYWASTRHTGVPSRFSGSGSRTDFTLTISSLQPEDVADYFCHQYHSYPFTFGSGTKLEIK

SEQ ID NO: 2211 - protein, 107 aa, synthetic construct
DIQMTQSPSSLSASVGDRVTITCKASRDVAIAVAWYQQKPGKVPKLLIYWASTRHTGVPSRFSGSGSRTDFTLTISSLQPEDVADYFCHQYSAYPFTFGSGTKLEIK

SEQ ID NO: 2212 - protein, 107 aa, synthetic construct
DIQMTQSPSSLSASVGDRVTITCKASRDVAIAVAWYQQKPGKVPKLLIYWASTRHTGVPSRFSGSGSRTDFTLTISSLQPEDVADYFCHQYSQYPFTFGSGTKLEIK

SEQ ID NO: 2213 - protein, 107 aa, synthetic construct
DIQMTQSPSSLSASVGDRVTITCKASRDVAIAVAWYQQKPGKVPKLLIYWASTRHTGVPSRFSGSGSRTDFTLTISSLQPEDVADYFCHQYSGYPFTFGSGTKLEIK

SEQ ID NO: 2214 - protein, 107 aa, synthetic construct
DIQMTQSPSSLSASVGDRVTITCKASRDVAIAVAWYQQKPGKVPKLLIYWASTRHTGVPSRFSGSGSRTDFTLTISSLQPEDVADYFCHQYSVYPFTFGSGTKLEIK

SEQ ID NO: 2215 - protein, 107 aa, synthetic construct
DIQMTQSPSSLSASVGDRVTITCKASRDVAIAVAWYQQKPGKVPKLLIYWASTRHTGVPSRFSGSGSRTDFTLTISSLQPEDVADYFCHQYSHYPFTFGSGTKLEIK

SEQ ID NO: 2216 - protein, 107 aa, synthetic construct
DIQMTQSPSSLSASVGDRVTITCKASRDVAIAVAWYQQKPGKVPKLLIYWASTRHTGVPSRFSGSGSRTDFTLTISSLQPEDVADYFCHQYSSHPFTFGSGTKLEIK

SEQ ID NO: 2217 - protein, 107 aa, synthetic construct
DIQMTQSPSSLSASVGDRVTITCKASRDVAIAVAWYQQKPGKVPKLLIYWASTRHTGVPSRFSGSGSRTDFTLTISSLQPEDVADYFCHQYSSLPFTFGSGTKLEIK

SEQ ID NO: 2218 - protein, 107 aa, synthetic construct
DIQMTQSPSSLSASVGDRVTITCKASRDVAIAVAWYQQKPGKVPKLLIYWASTRHTGVPSRFSGSGSRTDFTLTISSLQPEDVADYFCHQYSSWPFTFGSGTKLEIK

SEQ ID NO: 2219 - protein, 107 aa, synthetic construct
DIQMTQSPSSLSASVGDRVTITCKASRDVAIAVAWYQQKPGKVPKLLIYWASTRHTGVPSRFSGSGSRTDFTLTISSLQPEDVADYFCHQYSSAPFTFGSGTKLEIK

SEQ ID NO: 2220 - protein, 107 aa, synthetic construct
DIQMTQSPSSLSASVGDRVTITCKASRDVAIAVAWYQQKPGKVPKLLIYWASTRHTGVPSRFSGSGSRTDFTLTISSLQPEDVADYFCHQYSSQPFTFGSGTKLEIK

SEQ ID NO: 2221 - protein, 107 aa, synthetic construct
DIQMTQSPSSLSASVGDRVTITCKASRDVAIAVAWYQQKPGKVPKLLIYWASTRHTGVPSRFSGSGSRTDFTLTISSLQPEDVADYFCHQYSSYPLTFGSGTKLEIK

SEQ ID NO: 2222 - protein, 107 aa, synthetic construct
DIQMTQSPSSLSASVGDRVTITCKASRDVAIAVAWYQQKPGKVPKLLIYWASTRHTGVPSRFSGSGSRTDFTLTISSLQPEDVADYFCHQYSSYPWTFGSGTKLEIK

SEQ ID NO: 2223 - protein, 107 aa, synthetic construct
DIQMTQSPSSLSASVGDRVTITCKASRDVAIAVAWYQQKPGKVPKLLIYWASTRHTGVPSRFSGSGSRTDFTLTISSLQPEDVADYFCHQYSSYPHTFGSGTKLEIK

SEQ ID NO: 2224 - protein, 107 aa, synthetic construct
DIQMTQSPSSLSASVGDRVTITCKASRDVAIAVAWYQQKPGKVPKLLIYWASTRHTGVPSRFSGSGSRTDFTLTISSLQPEDVADYFCHQYSSYPQTFGSGTKLEIK

SEQ ID NO: 2225 - protein, 107 aa, synthetic construct
DIQMTQSPSSLSASVGDRVTITCKASRDVAIAVAWYQQKPGKVPKLLIYWASTRHTGVPSRFSGSGSRTDFTLTISSLQPEDVADYFCHQYSSYPSTFGSGTKLEIK

SEQ ID NO: 2226 - protein, 107 aa, synthetic construct
DIQMTQSPSSLSASVGDRVTITCKASRDVAIAVAWYQQKPGKVPKLLIYWASTRHTGVPSRFSGSGSRTDFTLTISSLQPEDVADYFCHQYSSYPFVFGSGTKLEIK

SEQ ID NO: 2227 - protein, 107 aa, synthetic construct
DIQMTQSPSSLSASVGDRVTITCKASRDVAIAVAWYQQKPGKVPKLLIYWASTRHTGVPSRFSGSGSRTDFTLTISSLQPEDVADYFCHQYSSYPFAFGSGTKLEIK

SEQ ID NO: 2228 - protein, 107 aa, synthetic construct
DIQMTQSPSSLSASVGDRVTITCKASRDVAIAVAWYQQKPGKVPKLLIYWASTRHTGVPSRFSGSGSRTDFTLTISSLQPEDVADYFCHQYSSYPFQFGSGTKLEIK

SEQ ID NO: 2229 - protein, 107 aa, synthetic construct
DIQMTQSPSSLSASVGDRVTITCKASRDVAIAVAWYQQKPGKVPKLLIYWASTRHTGVPSRFSGSGSRTDFTLTISSLQPEDVADYFCHQYSSYPFHFGSGTKLEIK

SEQ ID NO: 2230 - protein, 107 aa, synthetic construct
DIQMTQSPSSLSASVGDRVTITCKASRDVAIAVAWYQQKPGKVPKLLIYWASTRHTGVPSRFSGSGSRTDFTLTISSLQPEDVADYFCHQYSSYPFDFGSGTKLEIK

SEQ ID NO: 2231 - protein, 107 aa, synthetic construct
DIQMTQSPSSLSASVGDRVTITCKASRDVAIAVAWYQQKPGKVPKLLIYWASQRHTGVPSRFSGSGSRTDFTLTISSLQPEDVADYFCYQYSSYPFTFGSGTKLEIK

SEQ ID NO: 2232 - protein, 107 aa, synthetic construct; identical to SEQ ID NO: 1248

SEQ ID NO: 2233 - protein, 120 aa, synthetic construct
QVQLVQSGAEVKKPGSSVKVSCKASGYTFTDQTIHWMRKAPGQGLEWIGYIYPRDDSPKYNENFKGKVTITADKSTSTAYMELSSLRSEDTAVYYCAIPDRSGYAWFIYWGQGTLVTVSS

SEQ ID NO: 2234 - protein, 107 aa, synthetic construct
DIQMTQSPSSLSASVGDRVTITCKASRDVAIAVAWYQEKPGKVPKLLIYWASVRHTGVPSRFSGSGSRTDFTLTISSLQPEDVADYFCYQYSSYPFTFGSGTKLEIK

SEQ ID NO: 2235 - protein, 120 aa, synthetic construct
QVQLVQSGAEVKKPGSSVKVSCKASGYTFTDQTIHWMRKAPGQGLEWIGYIYPRDDSPKYNENFKGKVTITADKSTSTAYMELSSLRSEDTAVYYCAIPDRSGYAFFIYWGQGTLVTVSS

SEQ ID NO: 2236 - protein, 11 aa, synthetic construct
PDRSGYAFFIY

SEQ ID NO: 2237 - protein, 107 aa, synthetic construct
DIQMTQSPSSLSASVGDRVTITCKASRDVAIAVAWYQEKPGKVPKLLIYWASQRHTGVPSRFSGSGSRTDFTLTISSLQPEDVADYFCYQYSSYPFTFGSGTKLEIK

SEQ ID NO: 2238 - protein, 7 aa, synthetic construct
WASQRHT

SEQ ID NO: 2239 - protein, 5 aa, synthetic construct
DQTLH

SEQ ID NO: 2240 - protein, 453 aa, synthetic construct; identical to SEQ ID NO: 1132

SEQ ID NO: 2241 - protein, 124 aa, synthetic construct
QVQLVQSGAEVKKPGASVKVSCKVSGFSVTSYNVHWVREAPGQGLEWMGVMWYGGNTDYNSKFQGRVTMTRDTSTNTVYMELSSLRSEDTAVYYCARAGRYYVDSNYYWDFPYWGQGTLVTVSS

SEQ ID NO: 2242 - protein, 214 aa, synthetic construct; identical to SEQ ID NO: 1086

SEQ ID NO: 2243 - protein, 107 aa, synthetic construct
DIQMTQSPSSVSASVGDRVTITCRASEDIYSGLAWYQKKPGKSPKLLIYGASSLQDGVPSRFSGSGSGTDYTLTISSLQPEDFATYFCQEGLKSPYTFGQGTKLEIK

SEQ ID NO: 2244 - protein, 449 aa, synthetic construct; identical to SEQ ID NO: 1057

SEQ ID NO: 2245 - protein, 214 aa, synthetic construct; identical to SEQ ID NO: 1087

SEQ ID NO: 2246-2249 - skipped (4 entries)

SEQ ID NO: 2250 - protein, 449 aa, synthetic construct; identical to SEQ ID NO: 1089

SEQ ID NO: 2251 - protein, 214 aa, synthetic construct; identical to SEQ ID NO: 1091

SEQ ID NO: 2252 - protein, 453 aa, synthetic construct; identical to SEQ ID NO: 1108

SEQ ID NO: 2253 - protein, 124 aa, synthetic construct
QVQLVQSGAEVKKPGASVKVSCKVSGFSVTRYNVHWVREAPGQGLEWMGVMWSGANTDYNSKFQGRVTMTRDTSTNTVYMELSSLRSEDTAVYYCARAGRYYVDSNYYWDFPYWGQGTLVTVSS

SEQ ID NO: 2254-2257 - skipped (4 entries)

SEQ ID NO: 2258 - protein, 453 aa, synthetic construct; identical to SEQ ID NO: 1084

SEQ ID NO: 2259 - protein, 124 aa, synthetic construct
QVQLVQSGAEVKKPGASVKVSCKVSGFPVTSYNVHWVREAPGQGLEWMGVMWYGGNTDYNSKFQGRVTMTRDTSTNTVYMELSSLRSEDTAVYYCARAGRYYHDSNYYWDFPYWGQGTLVTVSS

SEQ ID NO: 2260-2263 - skipped (4 entries)

SEQ ID NO: 2264 - protein, 438 aa, synthetic construct; identical to SEQ ID NO: 1323

SEQ ID NO: 2265 - protein, 231 aa, synthetic construct; identical to SEQ ID NO: 1373

SEQ ID NO: 2266 - protein, 449 aa, synthetic construct; identical to SEQ ID NO: 1308

SEQ ID NO: 2267 - protein, 214 aa, synthetic construct; identical to SEQ ID NO: 1326

SEQ ID NO: 2268 - skipped

SEQ ID NO: 2269 - protein, 231 aa, synthetic construct; identical to SEQ ID NO: 1349

SEQ ID NO: 2270-2271 - skipped (2 entries)

SEQ ID NO: 2272 - protein, 453 aa, synthetic construct
QVQLVQSGAEVKKPGASVKVSCKASGYDFTYYGISWVREAPGQGLEWMGWISTYNGNTHYARMLQGRVTMTTDTSTRTAYMELRSLRSDDTAVYYCARENYYGSGAYRGGMDVWGQGTTVTVSSASTKGPSVFPLAPSSKSTSGGTAALGCLVKDYFPEPVTVSWNSGALTSGVHTFPAVLQSSGLYSLSSVVTVPSSSLGTQTYICNVNHKPSDTKVDEKVEPDSCDKTHTCPPCPAPPVAGPSVFLFPPKPKDTLMISRTPEVTCVVVDVKHEDPEVKFNWYVDGVEVHNAKTKPREEEYNSTYRVVSVLTVLHQDWLNGKEYKCKVSNKALPAPIEKTISKAKGQPREPQVYTLPPSREEMTKNQVSLTCDVSGFYPSDIAVEWESDGQPENNYKTTPPVLDSDGSFFLYSKLTVDKSRWEQGDVFSCSVLHEALHSHYTQKSLSLSPGK

SEQ ID NO: 2273 - protein, 449 aa, synthetic construct; identical to SEQ ID NO: 1057

SEQ ID NO: 2274 - protein, 214 aa, synthetic construct
EIVLTQSPATLSLSPGERATLSCRASQSVSSYLAWYQKKPGQAPRLLIYDASNRATGIPARFSGSGSGTDFTLTISSLEPEDFAVYYCQQRSNWPWTFGQGTKVEIKRTVAAPSVFIFPPSKKQLKSGTASVVCLLNNFYPREAKVQWKVDNALQSGNSQESVTEQDSKDSTYSLSSTLTLSKADYEKHKVYACEVTHQGLSSPVTKSFNRGEC

SEQ ID NO: 2275 - protein, 214 aa, synthetic construct; identical to SEQ ID NO: 1087

SEQ ID NO: 2276 - protein, 445 aa, synthetic construct
QVQLVQSGAEVKKPGASVKVSCKASGFDIQDTYMHWVKERPGQGLEWMGRIDPASGHTKYDPKFQVRVTITRDTSTSTVYLELSSLRSEDTAVYYCARSGGLPDVWGQGTTVTVSSASTKGPSVFPLAPSSKSTSGGTAALGCLVKDYFPEPVTVSWNSGALTSGVHTFPAVLQSSGLYSLSSVVTVPSSSLGTQTYICNVNHKPSDTKVDEKVEPDSCDKTHTCPPCPAPPVAGPSVFLFPPKPKDTLMISRTPEVTCVVVDVKHEDPEVKFNWYVDGVEVHNAKTKPREEEYNSTYRVVSVLTVLHQDWLNGKEYKCKVSNKALPAPIEKTISKAKGQPREPQVYTLPPSREEMTKNQVSLTCDVSGFYPSDIAVEWESDGQPENNYKTTPPVLDSDGSFFLYSKLTVDKSRWEQGDVFSCSVLHEALHSHYTQKSLSLSPGK

SEQ ID NO: 2277 - protein, 449 aa, synthetic construct; identical to SEQ ID NO: 1057

SEQ ID NO: 2278 - protein, 213 aa, synthetic construct
EIVLTQSPGTLSLSPGERATLSCRASSSVSYMYWYQKKPGQAPRPLIYATSNLASGIPDRFSGSGSGTDFTLTISRLEPEDFAVYYCQQWEGNPRTFGGGTKLEIKRTVAAPSVFIFPPSKKQLKSGTASVVCLLNNFYPREAKVQWKVDNALQSGNSQESVTEQDSKDSTYSLSSTLTLSKADYEKHKVYACEVTHQGLSSPVTKSFNRGEC

SEQ ID NO: 2279 - protein, 214 aa, synthetic construct; identical to SEQ ID NO: 1087

SEQ ID NO: 2280 - protein, 448 aa, synthetic construct
QVQLVQSGAEVKKPGASVKVSCKASGYTFTSYDINWVREAPGQGLEWMGWLNPNSGYTGYAQKFQGRVTMTADRSTSTAYMELSSLRSEDTAVYYCAREVPETAAFEYWGQGTLVTVSSASTKGPSVFPLAPSSKSTSGGTAALGCLVKDYFPEPVTVSWNSGALTSGVHTFPAVLQSSGLYSLSSVVTVPSSSLGTQTYICNVNHKPSDTKVDEKVEPDSCDKTHTCPPCPAPPVAGPSVFLFPPKPKDTLMISRTPEVTCVVVDVKHEDPEVKFNWYVDGVEVHNAKTKPREEEYNSTYRVVSVLTVLHQDWLNGKEYKCKVSNKALPAPIEKTISKAKGQPREPQVYTLPPSREEMTKNQVSLTCDVSGFYPSDIAVEWESDGQPENNYKTTPPVLDSDGSFFLYSKLTVDKSRWEQGDVFSCSVLHEALHSHYTQKSLSLSPGK

SEQ ID NO: 2281 - protein, 449 aa, synthetic construct; identical to SEQ ID NO: 1057

SEQ ID NO: 2282 - protein, 217 aa, synthetic construct
QSVLTQPPSVSGAPGQRVTISCTSSSSDIGAGLGVHWYQKLPGTAPKLLIEGYYNRPSGVPDRFSGSKSGTSASLTITGLLPEDEGDYYCQSWDGTLSALFGGGTKLTVLRTVAAPSVFIFPPSKKQLKSGTASVVCLLNNFYPREAKVQWKVDNALQSGNSQESVTEQDSKDSTYSLSSTLTLSKADYEKHKVYACEVTHQGLSSPVTKSFNRGEC

SEQ ID NO: 2283 - protein, 214 aa, synthetic construct; identical to SEQ ID NO: 1087

SEQ ID NO: 2284 - protein, 448 aa, synthetic construct
EVQLVESGGGLVKPGGSLRLSCAASGFTFSNAWMTWVREAPGKGLEWVGRIKSKIDAGTTDYAAPVKGRFTISRDDSKNTLYLQMNSLKTEDTAVYYCTTDLGWGENYWGQGTLVTVSSASTKGPSVFPLAPSSKSTSGGTAALGCLVKDYFPEPVTVSWNSGALTSGVHTFPAVLQSSGLYSLSSVVTVPSSSLGTQTYICNVNHKPSDTKVDEKVEPDSCDKTHTCPPCPAPPVAGPSVFLFPPKPKDTLMISRTPEVTCVVVDVKHEDPEVKFNWYVDGVEVHNAKTKPREEEYNSTYRVVSVLTVLHQDWLNGKEYKCKVSNKALPAPIEKTISKAKGQPREPQVYTLPPSREEMTKNQVSLTCDVSGFYPSDIAVEWESDGQPENNYKTTPPVLDSDGSFFLYSKLTVDKSRWEQGDVFSCSVLHEALHSHYTQKSLSLSPGK

SEQ ID NO: 2285 - protein, 449 aa, synthetic construct; identical to SEQ ID NO: 1057

SEQ ID NO: 2286 - protein, 215 aa, synthetic construct
ENVLTQSPGTLSLSPGERATLSCRASQRVSSSYLVWYQKKPGQAPRLLIYGASSRATGIPDRFSGSGSGTDFTLTISRLEPEDFAVYYCQQYGSSPYTFGQGTKLEIKRTVAAPSVFIFPPSKKQLKSGTASVVCLLNNFYPREAKVQWKVDNALQSGNSQESVTEQDSKDSTYSLSSTLTLSKADYEKHKVYACEVTHQGLSSPVTKSFNRGEC

SEQ ID NO: 2287 - protein, 214 aa, synthetic construct; identical to SEQ ID NO: 1087

SEQ ID NO: 2288 - protein, 447 aa, synthetic construct
EVQLVQSGAEVKKPGASVKVSCKASGYTFTGYYMHWVREAPGQGLEWMGWINPKSGGTNYAQKFQGRVTMTRDTSISTAYMELSRLISDDTAVYYCATGGSFDAFDVWGQGTMVTVSSASTKGPSVFPLAPSSKSTSGGTAALGCLVKDYFPEPVTVSWNSGALTSGVHTFPAVLQSSGLYSLSSVVTVPSSSLGTQTYICNVNHKPSDTKVDEKVEPDSCDKTHTCPPCPAPPVAGPSVFLFPPKPKDTLMISRTPEVTCVVVDVKHEDPEVKFNWYVDGVEVHNAKTKPREEEYNSTYRVVSVLTVLHQDWLNGKEYKCKVSNKALPAPIEKTISKAKGQPREPQVYTLPPSREEMTKNQVSLTCDVSGFYPSDIAVEWESDGQPENNYKTTPPVLDSDGSFFLYSKLTVDKSRWEQGDVFSCSVLHEALHSHYTQKSLSLSPGK

SEQ ID NO: 2289 - protein, 449 aa, synthetic construct; identical to SEQ ID NO: 1057

SEQ ID NO: 2290 - protein, 214 aa, synthetic construct
DIVMTQSPSSLSASVGDRVTITCRASQSISSYLNWYQKSPGKAPKILIYGASRLQSGVPSRFSGSGSGTDFTLAISSLQPEDFATYYCQQGDNTPFTFGPGTKLEIKRTVAAPSVFIFPPSKKQLKSGTASVVCLLNNFYPREAKVQWKVDNALQSGNSQESVTEQDSKDSTYSLSSTLTLSKADYEKHKVYACEVTHQGLSSPVTKSFNRGEC

SEQ ID NO: 2291 - protein, 214 aa, synthetic construct; identical to SEQ ID NO: 1087

SEQ ID NO: 2292 - protein, 453 aa, synthetic construct; identical to SEQ ID NO: 1132

SEQ ID NO: 2293 - protein, 446 aa, synthetic construct
EVQLVQSGAEVKKPGESLKISCKGSGYSFSNYWIGWVRKMPGKGLEWMGIIDPSNSYTRYSPSFQGQVTISADKSISTAYLQWSSLKASDTAMYYCARWYYKPFDVWGQGTLVTVSSASTKGPSVFPLAPSSKSTSGGTAFLGCLVKDYFPEPVTVSWNSGALTSGVHTFPAVLQSSGLYSLSSVVTVPSSSLGTQTYICNVNHKPSNTKVDKKVEPKSCDKTHTCPPCPAPPVAGPSVFLFPPKPKDTLMISRTPEVTCVVVDVKHEDPEVKFNWYVDGVEVHNAKTKPREEQYNSTYRVVSVLTVLHQDWLNGKEYKCKVSNKALPAPIEKTISKAKGQPREPQVYTLPPSREQMTKNQVKLTCLVKGFYPSDIAVEWESNGQPENNYKTTPPVLDSDGSFFLYSKLTVDKSRWQQGNVFSCSVLHEALHSHYTQKSLSLSPGK

SEQ ID NO: 2294 - protein, 214 aa, synthetic construct; identical to SEQ ID NO: 1086

SEQ ID NO: 2295 - protein, 218 aa, synthetic construct
QSVLTQPPSVSGAPGQRVTISCTGSSSNIGSGYDVHWYQELPGTAPKLLIYGNSKRPSGVPDRFSGSKSGTSASLAITGLQSEDEADYYCASWTDGLSLVVFGGGTKLTVLRTVAAPSVFIAPPSDEQLKSGTASVVCLLNNFYPREAKVQWKVDNALQSGNSQESVTEQDSKDSTYSLSSTLTLSKADYEKHKVYACEVTHQGLSSPVTKSFNRGEC

SEQ ID NO: 2296 - protein, 453 aa, synthetic construct; identical to SEQ ID NO: 1132

SEQ ID NO: 2297 - protein, 445 aa, synthetic construct
QVQLVQSGAEVKKPGASVKVSCKASGYIFITYWMTWVRKAPGQGLEWMGQIFPASGSADYNEKFEGRVTMTTDTSTSTAYMELRSLRSDDTAVYYCARGGGGFAYWGQGTLVTVSSASTKGPSVFPLAPSSKSTSGGTAFLGCLVKDYFPEPVTVSWNSGALTSGVHTFPAVLQSSGLYSLSSVVTVPSSSLGTQTYICNVNHKPSNTKVDKKVEPKSCDKTHTCPPCPAPPVAGPSVFLFPPKPKDTLMISRTPEVTCVVVDVKHEDPEVKFNWYVDGVEVHNAKTKPREEQYNSTYRVVSVLTVLHQDWLNGKEYKCKVSNKALPAPIEKTISKAKGQPREPQVYTLPPSREQMTKNQVKLTCLVKGFYPSDIAVEWESNGQPENNYKTTPPVLDSDGSFFLYSKLTVDKSRWQQGNVFSCSVLHEALHSHYTQKSLSLSPGK

SEQ ID NO: 2298 - protein, 214 aa, synthetic construct; identical to SEQ ID NO: 1086

SEQ ID NO: 2299 - protein, 214 aa, synthetic construct
DIQMTQSPSSLSASVGDRVTITCRTSENIYSYLAWYQEKPGKAPKLLIYNAKTLAEGVPSRFSGSGSGTDFTLTISSLQPEDFATYYCQHHYGIPFTFGQGTKVEIKRTVAAPSVFIAPPSDEQLKSGTASVVCLLNNFYPREAKVQWKVDNALQSGNSQESVTEQDSKDSTYSLSSTLTLSKADYEKHKVYACEVTHQGLSSPVTKSFNRGEC

SEQ ID NO: 2300 - protein, 453 aa, synthetic construct; identical to SEQ ID NO: 1132

SEQ ID NO: 2301 - protein, 444 aa, synthetic construct
QVQLVQSGAEVKKPGSSVKVSCKASGYKFTRYVMHWVRKAPGQGLEWMGYINPYNDGTNYNEKFKGRVTITADKSTSTAYMELSSLRSEDTAVYYCARNWDTGLWGQGTTVTVSSASTKGPSVFPLAPSSKSTSGGTAFLGCLVKDYFPEPVTVSWNSGALTSGVHTFPAVLQSSGLYSLSSVVTVPSSSLGTQTYICNVNHKPSNTKVDKKVEPKSCDKTHTCPPCPAPPVAGPSVFLFPPKPKDTLMISRTPEVTCVVVDVKHEDPEVKFNWYVDGVEVHNAKTKPREEQYNSTYRVVSVLTVLHQDWLNGKEYKCKVSNKALPAPIEKTISKAKGQPREPQVYTLPPSREQMTKNQVKLTCLVKGFYPSDIAVEWESNGQPENNYKTTPPVLDSDGSFFLYSKLTVDKSRWQQGNVFSCSVLHEALHSHYTQKSLSLSPGK

SEQ ID NO: 2302 - protein, 214 aa, synthetic construct; identical to SEQ ID NO: 1086

SEQ ID NO: 2303 - protein, 214 aa, synthetic construct
DIQMTQSPSSLSASVGDRVTITCKASDHILKFLTWYQEKPGKAPKLLIYGATSLETGVPSRFSGSGSGTDFTLTISSLQPEDFATYYCQMYWSTPFTFGGGTKVEIKRTVAAPSVFIAPPSDEQLKSGTASVVCLLNNFYPREAKVQWKVDNALQSGNSQESVTEQDSKDSTYSLSSTLTLSKADYEKHKVYACEVTHQGLSSPVTKSFNRGEC

SEQ ID NO: 2304 - protein, 453 aa, synthetic construct; identical to SEQ ID NO: 1132

SEQ ID NO: 2305 - protein, 453 aa, synthetic construct
QVQLVESGGGVVQPGRSLRLSCAASGFTFSSYGMHWVRKAPGKGLEWVAVIWYDGSNEYYADSVKGRFTISRDNSKNTLYLQMNSLRAEDTAVYYCARDRGYTSSWYPDAFDIWGQGTMVTVSSASTKGPSVFPLAPSSKSTSGGTAFLGCLVKDYFPEPVTVSWNSGALTSGVHTFPAVLQSSGLYSLSSVVTVPSSSLGTQTYICNVNHKPSNTKVDKKVEPKSCDKTHTCPPCPAPPVAGPSVFLFPPKPKDTLMISRTPEVTCVVVDVKHEDPEVKFNWYVDGVEVHNAKTKPREEQYNSTYRVVSVLTVLHQDWLNGKEYKCKVSNKALPAPIEKTISKAKGQPREPQVYTLPPSREQMTKNQVKLTCLVKGFYPSDIAVEWESNGQPENNYKTTPPVLDSDGSFFLYSKLTVDKSRWQQGNVFSCSVLHEALHSHYTQKSLSLSPGK

SEQ ID NO: 2306 - protein, 214 aa, synthetic construct; identical to SEQ ID NO: 1086

SEQ ID NO: 2307 - protein, 218 aa, synthetic construct
QSVLTQPPSVSGAPGQRVTISCTGSSSNTGAGYDVHWYQEVPGTAPKLLIYGSGNRPSGVPDRFSGSKSGTSASLAITGLQAEDEADYYCQSYDSSLSGWVFGGGTRLTVLRTVAAPSVFIAPPSDEQLKSGTASVVCLLNNFYPREAKVQWKVDNALQSGNSQESVTEQDSKDSTYSLSSTLTLSKADYEKHKVYACEVTHQGLSSPVTKSFNRGEC

SEQ ID NO: 2308 - protein, 453 aa, synthetic construct; identical to SEQ ID NO: 1132

SEQ ID NO: 2309 - protein, 452 aa, synthetic construct
EVQLLESGGGLVQPGGSLRLSCAASGFTFSAYGMDWVRKAPGKGLEWVSSISPSGGRTKYADSVKGRFTISRDNSKNTLYLQMNSLRAEDTAVYYCAKDLGGGYYYYYGMDVWGQGTLVTVSSASTKGPSVFPLAPSSKSTSGGTAFLGCLVKDYFPEPVTVSWNSGALTSGVHTFPAVLQSSGLYSLSSVVTVPSSSLGTQTYICNVNHKPSNTKVDKKVEPKSCDKTHTCPPCPAPPVAGPSVFLFPPKPKDTLMISRTPEVTCVVVDVKHEDPEVKFNWYVDGVEVHNAKTKPREEQYNSTYRVVSVLTVLHQDWLNGKEYKCKVSNKALPAPIEKTISKAKGQPREPQVYTLPPSREQMTKNQVKLTCLVKGFYPSDIAVEWESNGQPENNYKTTPPVLDSDGSFFLYSKLTVDKSRWQQGNVFSCSVLHEALHSHYTQKSLSLSPGK

SEQ ID NO: 2310 - protein, 214 aa, synthetic construct; identical to SEQ ID NO: 1086

SEQ ID NO: 2311 - protein, 219 aa, synthetic construct
QYELTQPASVSGSPGQSITISCTGTSSDVGGYNYVSWYQEHPGKAPKLMIYEVSNRPSGVSNRFSGSKSGNTASLTISGLQAEDEADYYCSSYTSSSTLFYVFGTGTKVTVLRTVAAPSVFIAPPSDEQLKSGTASVVCLLNNFYPREAKVQWKVDNALQSGNSQESVTEQDSKDSTYSLSSTLTLSKADYEKHKVYACEVTHQGLSSPVTKSFNRGEC

SEQ ID NO: 2312 - protein, 454 aa, synthetic construct
QVQLVQSGAEVKKPGASVKVSCKVSGFSVTSYNVHWVRQAPGQGLEWMGVMWSGGNTDYNSKFQGRVTMTRDTSTNTVYMELSSLRSEDTAVYYCARAGRYYHDSNYYWDFPYWGQGTLVTVSSASTKGPSVFPLAPSSKSTSGGTAALGCLVEDYFPEPVTVSWNSGALTSGVHTFPAVLQSSGLYSLSSVVTVPSSSLGTQTYICNVNHKPSNTKVDEKVEPKSCDKTHTCPPCPAPEAAGGPSVFLFPPKPKDTLMISRTPEVTCVVVDVSHEDPEVKFNWYVDGVEVHNAKTKPREEQYNSTYRVVSVLTVLHQDWLNGKEYKCKVSNKALGAPIEKTISKAKGQPREPQVCTLPPSRDELTKNQVSLSCAVKGFYPSDIAVEWESNGQPENNYKTTPPVLDSDGSFFLVSKLTVDKSRWQQGNVFSCSVLHEALHSHYTQKSLSLSPGK

SEQ ID NO: 2313 - protein, 439 aa, synthetic construct
DIQMTQSPSSLSASVGDRVTITCKASRDVAIAVAWYQQKPGKVPKLLIYWASTRHTGVPSRFSGSGSRTDFTLTISSLQPEDVADYFCHQYSSYPFTFGSGTKLEIKSSASTKGPSVFPLAPSSKSTSGGTAALGCLVKDYFPEPVTVSWNSGALTSGVHTFPAVLQSSGLYSLSSVVTVPSSSLGTQTYICNVNHKPSNTKVDKKVEPKSCDKTHTCPPCPAPEAAGGPSVFLFPPKPKDTLMISRTPEVTCVVVDVSHEDPEVKFNWYVDGVEVHNAKTKPREEQYNSTYRVVSVLTVLHQDWLNGKEYKCKVSNKALGAPIEKTISKAKGQPREPQVYTLPPCRDELTKNQVSLWCLVKGFYPSDIAVEWESNGQPENNYKTTPPVLDSDGSFFLYSKLTVDKSRWQQGNVFSCSVLHEALHSHYTQKSLSLSPGK

SEQ ID NO: 2314 - protein, 214 aa, synthetic construct; identical to SEQ ID NO: 1293

SEQ ID NO: 2315 - protein, 227 aa, synthetic construct; identical to SEQ ID NO: 1183

SEQ ID NO: 2316 - protein, 124 aa, synthetic construct
QVQLVQSGAEVKKPGASVKVSCKVSGFYVWSYNVHWVRQAPGQGLEWMGVMWKSANTDYNSKFQGRVTMTRDTSTNTVYMELSSLRSEDTAVYYCARAGRYYHDSNYYWDFPYWGQGTLVTVSS

SEQ ID NO: 2317 - protein, 124 aa, synthetic construct
QVQLVQSGAEVKKPGASVKVSCKVSGFSVLSYNVHWVRQAPGQGLEWMGVMWSSGNTDYNSKFQGRVTMTRDTSTNTVYMELSSLRSEDTAVYYCARAGRYYHDSNYYWDFPYWGQGTLVTVSS

SEQ ID NO: 2318 - protein, 124 aa, synthetic construct
QVQLVQSGAEVKKPGASVKVSCKVSGFSVTSYPVHWVRQAPGQGLEWMGVMWSSGKTDYNSKFQGRVTMTRDTSTNTVYMELSSLRSEDTAVYYCARAGRYYHDSNYYWDFPYWGQGTLVTVSS

SEQ ID NO: 2319 - protein, 124 aa, synthetic construct
QVQLVQSGAEVKKPGASVKVSCKVSGFSVTSQNVHWVRQAPGQGLEWMGVMASSGNTDYNSKFQGRVTMTRDTSTNTVYMELSSLRSEDTAVYYCARAGRYYHDSNYYWDFPYWGQGTLVTVSS

SEQ ID NO: 2320 - protein, 124 aa, synthetic construct; identical to SEQ ID NO: 1654

SEQ ID NO: 2321 - protein, 124 aa, synthetic construct; identical to SEQ ID NO: 1653

SEQ ID NO: 2322 - protein, 124 aa, synthetic construct; identical to SEQ ID NO: 1805

SEQ ID NO: 2323 - protein, 124 aa, synthetic construct; identical to SEQ ID NO: 1582

SEQ ID NO: 2324 - protein, 124 aa, synthetic construct; identical to SEQ ID NO: 1748

SEQ ID NO: 2325 - protein, 124 aa, synthetic construct; identical to SEQ ID NO: 1664

SEQ ID NO: 2326 - protein, 124 aa, synthetic construct; identical to SEQ ID NO: 1665

SEQ ID NO: 2327 - protein, 124 aa, synthetic construct; identical to SEQ ID NO: 1772

SEQ ID NO: 2328 - protein, 124 aa, synthetic construct; identical to SEQ ID NO: 1659

SEQ ID NO: 2329 - protein, 124 aa, synthetic construct; identical to SEQ ID NO: 1770

SEQ ID NO: 2330 - protein, 124 aa, synthetic construct; identical to SEQ ID NO: 1610

SEQ ID NO: 2331 - protein, 106 aa, synthetic construct
NIQMTQSPSSLSASVGDRVTITCRASQSISSYLNWYQQKPGKAPKLLIYGASSLQSGVPSRFSGSGSGTDFTLTISSLQPEDFATYHCQQSYRTLTFGGGTKVEIK

SEQ ID NO: 2332 - protein, 122 aa, synthetic construct
EVQLQQWGAGVLKPSETLSLTCAVYGGSLSDYYWSWIRQPPGKGLEWIGENHSGNTDYNPSLKSRVTISVDTSKNQFSLRVSSVTAEDTAFYFCARGGFSGSPNYYYAMDVWGQGTTVTVSS

SEQ ID NO: 2333 - protein, 123 aa, synthetic construct
EVQLQQWGAGVLKPSETLSLTCAVYGGSLSDYYWSWIRQPPGKGLEWIGEIQHSGNTDYNPSLKSRVTISVDTSKNQFSLRVSSVTAEDTAFYFCARGGFSGSPNYYYAMDVWGQGTTVTVSS

SEQ ID NO: 2334 - protein, 123 aa, synthetic construct
EVQLQQWGAGVLKPSETLSLTCAVYGGSLSDYYWSWIRQPPGKGLEWIGEIAHSGNTDYNPSLKSRVTISVDTSKNQFSLRVSSVTAEDTAFYFCARGGFSGSPNYYYAMDVWGQGTTVTVSS

SEQ ID NO: 2335 - protein, 123 aa, synthetic construct
EVQLQQWGAGVLKPSETLSLTCAVYGGSLSDYYWSWIRQPPGKGLEWIGEIGHSGNTDYNPSLKSRVTISVDTSKNQFSLRVSSVTAEDTAFYFCARGGFSGSPNYYYAMDVWGQGTTVTVSS

SEQ ID NO: 2336 - protein, 123 aa, synthetic construct
EVQLQQWGAGVLKPSETLSLTCAVYGGSLSDYYWSWIRQPPGKGLEWIGEIIHSGNTDYNPSLKSRVTISVDTSKNQFSLRVSSVTAEDTAFYFCARGGFSGSPNYYYAMDVWGQGTTVTVSS

SEQ ID NO: 2337 - protein, 123 aa, synthetic construct
EVQLQQWGAGVLKPSETLSLTCAVYGGSLSDYYWSWIRQPPGKGLEWIGEILHSGNTDYNPSLKSRVTISVDTSKNQFSLRVSSVTAEDTAFYFCARGGFSGSPNYYYAMDVWGQGTTVTVSS

SEQ ID NO: 2338 - protein, 123 aa, synthetic construct
EVQLQQWGAGVLKPSETLSLTCAVYGGSLSDYYWSWIRQPPGKGLEWIGEIMHSGNTDYNPSLKSRVTISVDTSKNQFSLRVSSVTAEDTAFYFCARGGFSGSPNYYYAMDVWGQGTTVTVSS

SEQ ID NO: 2339 - protein, 123 aa, synthetic construct
EVQLQQWGAGVLKPSETLSLTCAVYGGSLSDYYWSWIRQPPGKGLEWIGEISHSGNTDYNPSLKSRVTISVDTSKNQFSLRVSSVTAEDTAFYFCARGGFSGSPNYYYAMDVWGQGTTVTVSS

SEQ ID NO: 2340 - protein, 122 aa, synthetic construct
EVQLQQWGAGVLKPSETLSLTCAVYGGSLSDYYWSWIRQPGKGLEWIGEITHSGNTDYNPSLKSRVTISVDTSKNQFSLRVSSVTAEDTAFYFCARGGFSGSPNYYYAMDVWGQGTTVTVSS

SEQ ID NO: 2341 - protein, 123 aa, synthetic construct
EVQLQQWGAGVLKPSETLSLTCAVYGGSLSDYYWSWIRQPPGKGLEWIGEIVHSGNTDYNPSLKSRVTISVDTSKNQFSLRVSSVTAEDTAFYFCARGGFSGSPNYYYAMDVWGQGTTVTVSS

SEQ ID NO: 2342 - protein, 107 aa, synthetic construct
DIQMTQSPSSVSASVGDRVTITCRASQGISSWLAWYQQKPGKAPKLLIYAASSLQSGVPSRFSGSGSGTDFTLTISSLQPEDFATYYCQQSYSTPPDFGQGTRLEIK

SEQ ID NO: 2343 - protein, 123 aa, synthetic construct
ELQLQESGGGLVQPGGSLRLSCAASGFTFSSYAMSWVRQAPGKGPDWVSTIRTGGRTTYADSVKGRFTISRDNAKNTLYLQMNSLKSDDTAVYYCAKSRGTSWVPEIYEYDYWGQGTLVTVSS

SEQ ID NO: 2344 - protein, 107 aa, synthetic construct
ETTLTQSPSSLSASVGDRVTITCRASQSISSWLAWYQQKPGKAPKLLIYKASTLQTGVPSRFSGSGSGTEFTLIISSLQPEDSATYYCQQANSFPITFGQGTRLEIK

SEQ ID NO: 2345 - protein, 123 aa, synthetic construct
EVQLQQSGGGLVQPGGSLRLSCAASGFTFSSYAMSWVRQAPGKGPDWVSTIRTGGRTTYADSVKGRFTISRDNAKNTLYLQMNSLKSDDTAVYYCAKSRGTSWVPEIYEYDYWGQGTMVTVSS

SEQ ID NO: 2346 - protein, 108 aa, synthetic construct
EIVLTQSPGTLSLSPGERATLSCRASQSVSGTYLAWYKQKPGQAPRLLIFGASRRAAGIPDRFSGSRSGTDFTLTISRLEPEDFAVYYCQQYGSSGLTFGGGTKLEIK

SEQ ID NO: 2347 - protein, 122 aa, synthetic construct
ELQLVQSGGGLVQPGGSLRLSCAASGFAFSSYDMSWVRQAPGKGLEWVSAINSGGGSTYYADSMKGRFTISRDNAKNTLYLQMNSLKPEDTAVYYCNARLSWGSYYRDDEYWGQGTQVTVSS

SEQ ID NO: 2348 - protein, 110 aa, synthetic construct
EIVMTQSPATLSVSPGERATLSCRASQSVSSSYLAWYQQKPGQAPRLLIYGASSRATGIPDRFSGSGSGTDFTLTISRLEPEDFAVYYCQQYGSSPPSITFGQGTRLEIK

SEQ ID NO: 2349 - protein, 116 aa, synthetic construct
EVTLKESGGGLVQPGGSLRLSCAASGFTFSGYAMSWVRQAPGKGPEWVSTINSGGGSTSYADSVKGRFTISRDNAKSTLYLQMNSLKPEDTAVYYCAEGWTDFDYWGQGTQVTVSS

SEQ ID NO: 2350 - protein, 117 aa, synthetic construct
ELQLQESGPGLVKPSETLSLTCAVSGVSFSDYHWAWIRQPPGKGLEWIGDINHRGHTNYNPSLKSRVTVSIDTSKNQFSLKLSSVTAADTAVYFCARDFPNFIFDFWGQGTLVTVSS

SEQ ID NO: 2351 - protein, 107 aa, synthetic construct
DIQLTQSPGTLSLSPGERATLSCRASQSVSTYLAWYQQKPGQAPRLLIYGASKRATGIPDRFSGSGSGTDFTLTISRLEPEDFAVYYCQQYGDSPLTFGQGTKVEIK

SEQ ID NO: 2352 - protein, 117 aa, synthetic construct
ELQLQESGPGLVKPSETLSLTCAVSGVSFTDYHWAWIRQPPGKGLEWIGDINHRGHTNYNPSLKSRVTVSIDTSKNQFSLKLSSVTAADTAVYYCARDYPNFIYDYWGQGTLVTVSS

SEQ ID NO: 2353 - protein, 107 aa, synthetic construct
DIQLTQSPGTLSLSPGERATLSCRASQSVSNYLAWYQQKPGQAPRLLIYGASRRATGIPARFSGSGSGTDFTLTISSLEPEDFAVYYCQQYAASPLTFGQGTKVEIK

SEQ ID NO: 2354 - protein, 116 aa, synthetic construct
ELQLQESGPGLVKPSETLSLTCAVSGVSFSDYHWAWIRQPPGKGLEWIGDNHRGHTNYNPSLKSRVTVSIDTSKNQFSLKLSSVTAADTAVYFCARDFPNFIFDYWGQGTLVTVSS

SEQ ID NO: 2355 - protein, 107 aa, synthetic construct
DIQLTQSPGTLSLSPGERATLSCRASQSVSSYLAWYQQKPGQAPRLLIYGASKRATGIPDRFSGSGSGTDFTLTISRLEPEDFAVYYCQQYGDSPLTFGQGTKVEIK

SEQ ID NO: 2356 - protein, 117 aa, synthetic construct
ELQLQESGPGLVKPSETLSLTCAVSGISFNDFHWAWIRQPPGKGLEWIGDINHRGHTSYNPSLKSRVTVSVDTSKNQFSLKLSSVTAADTAVYYCARDYPNFTFDLWGQGTLVTVSS

SEQ ID NO: 2357 - protein, 107 aa, synthetic construct
DIQMTQSPATLSLSPGERATLSCRASQSVSTYLAWYQQKPGQAPRLLIYGASRRATGIPARFSGSGSGTDFTLTISSLQSEDFAVYYCQQYGDTPLTFGQGTKVEIK

SEQ ID NO: 2358 - protein, 117 aa, synthetic construct
EVQLQESGPGLVKPSETLSLTCAVSGVSYSDYHWAWIRQPPGKGLEWIGDINHKGKTNYNPSLKSRVTISVDTSKNQFSLKLSSVTAADTAVYYCARDYPNFLFDYWGQGTLVTVSS

SEQ ID NO: 2359 - protein, 107 aa, synthetic construct
AIQMTQSPGTLSLSPGERATLSCRASQSVSSHLAWYQQKPGQAPRLLIYGASRRATGIPARFSGSGSGTDFTLTISRLEPEDFAVYYCQQYADSPLTFGQGTKVEIK

SEQ ID NO: 2360 - protein, 117 aa, synthetic construct
ELQLQESGPGLVKPSETLSLTCAVSGLSFTDFYWAWIRQPPGKGLEWIGEINHKGNTSYNPSLKSRVTVSIDTSKNQFSLKLSSVTAADTAVYFCARDFPNYTFDFWGQGTLVTVSS

SEQ ID NO: 2361 - protein, 107 aa, synthetic construct
DIQLTQSPGTLSLSPGERATLSCRASQSVSNHLAWYQQKPGQAPRLLIYGASKRATGIPDRFSGSGSGTDFTLTISRLEPEDFAVYYCQQYADAPLTFGQGTKVEIK

SEQ ID NO: 2362 - protein, 116 aa, synthetic construct
QVQLQESGPGLVRPSQTLSLTCTVSGFDIQDTYMHWVRQRPGRGLEWMGRIEPAGGHTKYNPSLKSRVTITRDTSKNQVSLRLSSVTAADTAVYYCVRSGGLPDAWGQGSLVTVSS

SEQ ID NO: 2363 - protein, 106 aa, synthetic construct
DIQMTQSPSSLSASVGDRVTITCRASQGVRYMYWYQQKPGKAPKLLIYGASNLASGVPSRFSGSGSGTDFTFTISSLQPEDIATYYCQQWEGNPRTFGQGTKVEIK

SEQ ID NO: 2364 - protein, 120 aa, synthetic construct
QVQLVQSGAEVKKPGSSVKVSCKASGYTFTTQTLHWMRQAPGQGLEWIGYIYPRDGSTKYNENFKGKVTITADKSTSTAYMELSSLRSEDTAVYYCAIPDRSGYAWFQHWGQGTLVTVSS

SEQ ID NO: 2365 - protein, 107 aa, synthetic construct; identical to SEQ ID NO: 183

SEQ ID NO: 2366 - protein, 120 aa, synthetic construct
QVQLVQSGAEVKKPGSSVKVSCKASGYTFTSQTMHWMRQAPGQGLEWIGYIYPRDDYPKYNDNFKGKVTITADKSTSTAYMELSSLRSEDTAVYYCAIPDRSGYAWFIHWGQGTLVTVSS

SEQ ID NO: 2367 - protein, 107 aa, synthetic construct; identical to SEQ ID NO: 183

SEQ ID NO: 2368 - protein, 120 aa, synthetic construct
QVQLVQSGAEVKKPGSSVKVSCKASGYTFTAQTMHWMRQAPGQGLEWIGYIYPRDGSTKYNENFKGKVTITADKSTSTAYMELSSLRSEDTAVYYCAIPDRSGYAWFIVWGQGTLVTVSS

SEQ ID NO: 2369 - protein, 107 aa, synthetic construct
EIVMTQSPATLSVSPGERATLSCKASRDVAIAVAWYQQKPGQAPRLLLFWASTRHTGIPARFSGSGSRTEFTLTISSLQSEDFAVYYCHQYSSYPFTFGGGTKVEIK

SEQ ID NO: 2370 - protein, 120 aa, synthetic construct; identical to SEQ ID NO: 2364

SEQ ID NO: 2371 - protein, 107 aa, synthetic construct; identical to SEQ ID NO: 183

SEQ ID NO: 2372 - protein, 120 aa, synthetic construct
EVQLLESGGGLVQPGGSLRLSCAASGYTFTDQTIHWVRQAPGKGLEWIGYIYPRDDSPKYNENFKGRATLSADNSKNTAYLQMNSLRAEDTAVYYCAIPDRSGYAWFIYWGQGTTVTVSS

SEQ ID NO: 2373 - protein, 107 aa, synthetic construct; identical to SEQ ID NO: 2369

SEQ ID NO: 2374 - protein, 120 aa, synthetic construct; identical to SEQ ID NO: 2366

SEQ ID NO: 2375 - protein, 107 aa, synthetic construct; identical to SEQ ID NO: 183

SEQ ID NO: 2376 - protein, 120 aa, synthetic construct; identical to SEQ ID NO: 2368

SEQ ID NO: 2377 - protein, 107 aa, synthetic construct; identical to SEQ ID NO: 2369

SEQ ID NO: 2378 - protein, 120 aa, synthetic construct
QVQLVQSGAEVKKPGASVKVSCKTSGYTFTYYGISWVRQAPGQGLEWMGLISAYNGNTNYGQKVQGRVTMTTDTSTSTAYMELRSLRSDDTAVYYCVTENINWRDAFDIWGQGTMVTVSS

SEQ ID NO: 2379 - protein, 107 aa, synthetic construct
EIVLTQSPDFQSVTPKEKVTITCRASQTIGSSLHWYQQKPDQSPKLLIKYASQSISGVPSRFSGSGSGTDFTLTINSLEAEDAAAYYCHQSSSLPYTFGQGTKLEIK

1. A bispecific antibody comprising:
(a) a TL1A-binding domain comprising a first variable heavy domain (VH1) and a first variable light domain (VL1); and
(b) an IL23-binding domain comprising a second variable heavy domain (VH2) and a second variable light domain (VL2).

2. The bispecific antibody of claim 1, wherein:
(a) the VH1 and VL1 are selected from:
(1) (i) a variable heavy domain comprising a vhCDR1, a vhCDR2, and a vhCDR3 and a variable light domain comprising a vlCDR1, a vlCDR2, and a vlCDR3 contained within any pair of anti-TL1A variable heavy domain and variable light domain in Table 44, optionally wherein the CDRs are as defined by the Kabat, Chothia, Kabat+Chothia, AbM, contact, or IMGT definition;
(ii) a variable heavy domain comprising a vhCDR1, a vhCDR2, and a vhCDR3 and a variable light domain comprising a vlCDR1, a vlCDR2, and a vlCDR3 contained within any pair of anti-TL1A variable heavy domain and variable light domain in Tables 7-10, 22, 23, 26, 29-34, and 48, optionally wherein the CDRs are as defined by the Kabat, Chothia, Kabat+Chothia, AbM, contact, or IMGT definition; and
(iii) a variable heavy domain comprising a vhCDR1, a vhCDR2, and a vhCDR3 contained within a variable heavy domain comprising the amino acid sequence of any one of SEQ ID NOS: 1427-1823 and 2316-2330, and a variable light domain comprising a vlCDR1, a vlCDR2, and a vlCDR3 contained within a variable light domain comprising the amino acid sequence of any one of 1824-1923, optionally wherein the CDRs are as defined by the Kabat, Chothia, Kabat+Chothia, AbM, contact, or IMGT definition;
(2) (i) any pair of anti-TL1A variable heavy domain and variable light domain in Table 44; and
(ii) any pair of anti-TL1A variable heavy domain and variable light domain in Tables 7-10, 22, 23, 26, 29-34, and 48; and
(iii) a variable heavy domain comprising the amino acid sequence of any one of SEQ ID NOS: 1427-1823 and 2316-2330, and a variable light domain comprising the amino acid sequence of any one of 1824-1923,
or variants thereof in which an N-terminal glutamine or glutamate is replaced with pyroglutamate; and/or
(b) the VH2 and VL2 are selected from:
(1) (i) a variable heavy domain comprising a vhCDR1, a vhCDR2, and a vhCDR3 and a variable light domain comprising a vlCDR1, a vlCDR2, and a vlCDR3 contained within any pair of anti-TL1A variable heavy domain and variable light domain in Table 44, optionally wherein the CDRs are as defined by the Kabat, Chothia, Kabat+Chothia, AbM, contact, or IMGT definition;
(ii) a variable heavy domain comprising a vhCDR1, a vhCDR2, and a vhCDR3 and a variable light domain comprising a vlCDR1, a vlCDR2, and a vlCDR3 contained within any pair of anti-TL1A variable heavy domain and variable light domain in Tables 11, 24-26, 29-34, and 49, optionally wherein the CDRs are as defined by the Kabat, Chothia, Kabat+Chothia, AbM, contact, or IMGT definition;
(iii) a variable heavy domain comprising a vhCDR1, a vhCDR2, and a vhCDR3 contained within a variable heavy domain comprising the amino acid sequence of any one of 1927-2132, and a variable light domain comprising a vlCDR1, a vlCDR2, and a vlCDR3 contained within a variable light domain comprising the amino acid sequence of any one of 2133-2232, optionally wherein the CDRs are as defined by the Kabat, Chothia, Kabat+Chothia, AbM, contact, or IMGT definition;
(2) (i) any pair of anti-IL23 variable heavy domain and variable light domain in Table 44; and
(ii) any pair of anti-IL23 variable heavy domain and variable light domain in Tables 11, 24-26, 29-34, and 49; and
(iii) a variable heavy domain comprising the amino acid sequence of any one of 1927-2132, and a variable light domain comprising the amino acid sequence of any one of 2133-2232,
or variants thereof in which an N-terminal glutamine or glutamate is replaced with pyroglutamate.

3. The bispecific antibody of claim 1, wherein the VH1 and the VL1 are selected from the following:
(a) a variable heavy domain comprising a vhCDR1, a vhCDR2, and a vhCDR3 contained within a variable heavy domain comprising the amino acid sequence of any one of SEQ ID NOS: 2241, 2253, 2259, 1674, and 1200, and a variable light domain comprising a vlCDR1, a vlCDR2, and a vlCDR3 contained within a variable light domain comprising the amino acid sequence of any one of SEQ ID NOS: 2243 and 1204;
(b) a variable heavy domain comprising a vhCDR1, a vhCDR2, and a vhCDR3 contained within a variable heavy domain comprising the amino acid sequence of SEQ ID NO: 2241, and a variable light domain comprising a vlCDR1, a vlCDR2, and a vlCDR3 contained within a variable light domain comprising the amino acid sequence of SEQ ID NO: 2243;
(c) a variable heavy domain comprising a vhCDR1, a vhCDR2, and a vhCDR3 contained within a variable heavy domain comprising the amino acid sequence of SEQ ID NO: 2253, and a variable light domain comprising a vlCDR1, a vlCDR2, and a vlCDR3 contained within a variable light domain comprising the amino acid sequence of SEQ ID NO: 2243;
(d) a variable heavy domain comprising a vhCDR1, a vhCDR2, and a vhCDR3 contained within a variable heavy domain comprising the amino acid sequence of SEQ ID NO: 2259, and a variable light domain comprising a vlCDR1, a vlCDR2, and a vlCDR3 contained within a variable light domain comprising the amino acid sequence of SEQ ID NO: 2243;
(e) a variable heavy domain comprising a vhCDR1, a vhCDR2, and a vhCDR3 contained within a variable heavy domain comprising the amino acid sequence of SEQ ID NO: 1674, and a variable light domain comprising a vlCDR1, a vlCDR2, and a vlCDR3 contained within a variable light domain comprising the amino acid sequence of SEQ ID NO: 1204;
(f) a variable heavy domain comprising a vhCDR1, a vhCDR2, and a vhCDR3 contained within a variable heavy domain comprising the amino acid sequence of SEQ ID NO: 1200, and a variable light domain comprising a vlCDR1, a vlCDR2, and a vlCDR3 contained within a variable light domain comprising the amino acid sequence of SEQ ID NO: 1204;
(g) a variable heavy domain comprising a vhCDR1, a vhCDR2, and a vhCDR3 contained within a variable heavy domain comprising the amino acid sequence of SEQ ID NO: 1661, and a variable light domain comprising a vlCDR1, a vlCDR2, and a vlCDR3 contained within a variable light domain comprising the amino acid sequence of SEQ ID NO: 1204;
(h) a variable heavy domain comprising a vhCDR1, a vhCDR2, and a vhCDR3 contained within a variable heavy domain comprising the amino acid sequence of SEQ ID NO: 2323, and a variable light domain comprising a vlCDR1, a vlCDR2, and a vlCDR3 contained within a variable light domain comprising the amino acid sequence of SEQ ID NO: 1204; and
(i) a variable heavy domain comprising a vhCDR1, a vhCDR2, and a vhCDR3 and a variable light domain comprising a vlCDR1, a vlCDR2, and a vlCDR3 contained within any pair of anti-TL1A variable heavy domain and variable light domain in XENP53412, XENP53413, XENP53369, XENP53375, XENP53387, XENP53415, XENP53370, XENP53371, XENP53376, XENP53377, XENP53378, XENP53379, XENP53380, or XENP53414,
optionally wherein the CDRs are as defined by the Kabat, Chothia, Kabat+Chothia, AbM, contact, or IMGT definition.

4.-69. (canceled)

70. A pharmaceutical composition comprising the bispecific antibody of claim 1 and a pharmaceutically acceptable carrier.

71. A kit, vessel, or delivery device comprising the bispecific antibody of claim 1.

72. (canceled)

73. A nucleic acid composition comprising a nucleic acid or a set of nucleic acids encoding the bispecific antibody of claim 1.

74. (canceled)

75. A host cell comprising the nucleic acid composition of claim 73.

76. A method of making a bispecific antibody, comprising culturing the host cell of claim 75 under conditions wherein the bispecific antibody is expressed, and recovering the bispecific antibody.

77. A method of inhibiting or reducing TL1A-mediated activity and/or IL23-mediated activity in a subject in need thereof, comprising administering to the subject the bispecific antibody of claim 1.

78.-80. (canceled)

81. A method of treating a TL1A-associated disease and/or IL23-associated disease in a subject in need thereof, comprising administering to the subject the bispecific antibody of claim 1.

82.-86. (canceled)

87. An antibody comprising a TNF-like ligand 1A (TL1A) antigen-binding domain comprising a variable heavy domain and a variable light domain selected from the following sets of variable heavy domains and variable light domains:
(a) a variable heavy domain comprising a vhCDR1, a vhCDR2, and a vhCDR3 contained within a variable heavy domain comprising the amino acid sequence of any one of SEQ ID NOS: 2241, 2253, 2259, 1674, and 1200, and a variable light domain comprising a vlCDR1, a vlCDR2, and a vlCDR3 contained within a variable light domain comprising the amino acid sequence of any one of SEQ ID NOS: 2243 and 1204;
(b) a variable heavy domain comprising a vhCDR1, a vhCDR2, and a vhCDR3 contained within a variable heavy domain comprising the amino acid sequence of SEQ ID NO: 2241, and a variable light domain comprising a vlCDR1, a vlCDR2, and a vlCDR3 contained within a variable light domain comprising the amino acid sequence of SEQ ID NO: 2243;
(c) a variable heavy domain comprising a vhCDR1, a vhCDR2, and a vhCDR3 contained within a variable heavy domain comprising the amino acid sequence of SEQ ID NO: 2253, and a variable light domain comprising a vlCDR1, a vlCDR2, and a vlCDR3 contained within a variable light domain comprising the amino acid sequence of SEQ ID NO: 2243;
(d) a variable heavy domain comprising a vhCDR1, a vhCDR2, and a vhCDR3 contained within a variable heavy domain comprising the amino acid sequence of SEQ ID NO: 2259, and a variable light domain comprising a vlCDR1, a vlCDR2, and a vlCDR3 contained within a variable light domain comprising the amino acid sequence of SEQ ID NO: 2243;
(e) a variable heavy domain comprising a vhCDR1, a vhCDR2, and a vhCDR3 contained within a variable heavy domain comprising the amino acid sequence of SEQ ID NO: 1674, and a variable light domain comprising a vlCDR1, a vlCDR2, and a vlCDR3 contained within a variable light domain comprising the amino acid sequence of SEQ ID NO: 1204;
(f) a variable heavy domain comprising a vhCDR1, a vhCDR2, and a vhCDR3 contained within a variable heavy domain comprising the amino acid sequence of SEQ ID NO: 1200, and a variable light domain comprising a vlCDR1, a vlCDR2, and a vlCDR3 contained within a variable light domain comprising the amino acid sequence of SEQ ID NO: 1204;
(g) a variable heavy domain comprising a vhCDR1, a vhCDR2, and a vhCDR3 contained within a variable heavy domain comprising the amino acid sequence of any one of SEQ ID NOS: 1674, 1200, 1661, and 2323, and a variable light domain comprising a vlCDR1, a vlCDR2, and a vlCDR3 contained within a variable light domain comprising the amino acid sequence of SEQ ID NO: 1204;
(h) a variable heavy domain comprising a vhCDR1, a vhCDR2, and a vhCDR3 contained within a variable heavy domain comprising the amino acid sequence of SEQ ID NO: 1661, and a variable light domain comprising a vlCDR1, a vlCDR2, and a vlCDR3 contained within a variable light domain comprising the amino acid sequence of SEQ ID NO: 1204;
(i) a variable heavy domain comprising a vhCDR1, a vhCDR2, and a vhCDR3 contained within a variable heavy domain comprising the amino acid sequence of SEQ ID NO: 2323, and a variable light domain comprising a vlCDR1, a vlCDR2, and a vlCDR3 contained within a variable light domain comprising the amino acid sequence of SEQ ID NO: 1204; and
(j) a variable heavy domain comprising a vhCDR1, a vhCDR2, and a vhCDR3 and a variable light domain comprising a vlCDR1, a vlCDR2, and a vlCDR3 contained within a variable heavy domain and variable light domain pair in XENP53412, XENP53413, XENP53369, XENP53375, XENP53387, XENP53415, XENP53370, XENP53371, XENP53376, XENP53377, XENP53378, XENP53379, XENP53380, or XENP53414,
optionally wherein the CDRs are as defined by the Kabat, Chothia, Kabat+Chothia, AbM, contact, or IMGT definition.

88.-102. (canceled)

103. A pharmaceutical composition comprising the antibody of claim 87 and a pharmaceutically acceptable carrier.

104. (canceled)

105. A kit, vessel, or delivery device comprising the antibody of claim 87.

106. (canceled)

107. A nucleic acid composition comprising a nucleic acid or a set of nucleic acids encoding the antibody of claim 87.

108. (canceled)

109. A host cell comprising the nucleic acid composition of claim 107.

110. A method of making an anti-TL1A antibody, comprising culturing the host cell of claim 109 under conditions wherein anti-TL1A antibody is expressed, and recovering the anti-TL1A antibody.

111. A method of inhibiting or reducing TL1A-mediated activity in a subject in need thereof, comprising administering to the subject the antibody of claim 87.

112.-114. (canceled)

115. A method of treating a TL1A-associated disease in a subject in need thereof, comprising administering to the subject the antibody of claim 87.

116.-124. (canceled)

125. An antibody comprising an interleukin-23 (IL23) antigen-binding domain comprising a variable heavy domain and a variable light domain selected from the following sets of variable heavy domains and variable light domains:
(a) a variable heavy domain comprising a vhCDR1, a vhCDR2, and a vhCDR3 contained within a variable heavy domain comprising the amino acid sequence of any one of SEQ ID NOS: 2233, 2235, and 179, and a variable light domain comprising a vlCDR1, a vlCDR2, and a vlCDR3 contained within a variable light domain comprising the amino acid sequence of any one of SEQ ID NOS: 2234, 2237, and 1248;
(b) a variable heavy domain comprising a vhCDR1, a vhCDR2, and a vhCDR3 contained within a variable heavy domain comprising the amino acid sequence of SEQ ID NO: 2233, and a variable light domain comprising a vlCDR1, a vlCDR2, and a vlCDR3 contained within a variable light domain comprising the amino acid sequence of SEQ ID NO: 2234;
(c) a variable heavy domain comprising a vhCDR1, a vhCDR2, and a vhCDR3 contained within a variable heavy domain comprising the amino acid sequence of SEQ ID NO: 2235, and a variable light domain comprising a vlCDR1, a vlCDR2, and a vlCDR3 contained within a variable light domain comprising the amino acid sequence of SEQ ID NO: 2237;
(d) a variable heavy domain comprising a vhCDR1, a vhCDR2, and a vhCDR3 contained within a variable heavy domain comprising the amino acid sequence of SEQ ID NO: 179, and a variable light domain comprising a vlCDR1, a vlCDR2, and a vlCDR3 contained within a variable light domain comprising the amino acid sequence of SEQ ID NO: 1248;
(e) a variable heavy domain comprising a vhCDR1, a vhCDR2, and a vhCDR3 contained within a variable heavy domain comprising the amino acid sequence of SEQ ID NO: 2113, and a variable light domain comprising a vlCDR1, a vlCDR2, and a vlCDR3 contained within a variable light domain comprising the amino acid sequence of SEQ ID NO: 2231;
(f) a variable heavy domain comprising a vhCDR1, a vhCDR2, and a vhCDR3 contained within a variable heavy domain comprising the amino acid sequence of SEQ ID NO: 1967, and a variable light domain comprising a vlCDR1, a vlCDR2, and a vlCDR3 contained within a variable light domain comprising the amino acid sequence of SEQ ID NO: 1248; and
(g) a variable heavy domain comprising a vhCDR1, a vhCDR2, and a vhCDR3 and a variable light domain comprising a vlCDR1, a vlCDR2, and a vlCDR3 contained within a variable heavy domain and variable light domain pair in XENP53412, XENP53413, XENP53369, XENP53375, XENP53387, XENP53415, XENP53370, XENP53371, XENP53376, XENP53377, XENP53378, XENP53379, XENP53380, or XENP53414, optionally wherein the CDRs are as defined by the Kabat, Chothia, Kabat+Chothia, AbM, contact, or IMGT definition.

126.-140. (canceled)

141. A pharmaceutical composition comprising the antibody of claim 125 and a pharmaceutically acceptable carrier.

142. (canceled)

143. A kit, vessel, or delivery device comprising the antibody of claim 125.

144. (canceled)

145. A nucleic acid composition comprising a nucleic acid or a set of nucleic acids encoding the antibody of claim 125.

146. (canceled)

147. A host cell comprising the nucleic acid composition of claim 145.

148. A method of making an anti-IL23 antibody, comprising culturing the host cell of claim 147 under conditions wherein anti-IL23 antibody is expressed, and recovering the anti-IL23 antibody.

149. A method of inhibiting or reducing IL23-mediated activity in a subject in need thereof, comprising administering to the subject the antibody of claim 125.

150.-152. (canceled)

153. A method of treating an IL23-associated disease in a subject in need thereof, comprising administering to the subject the antibody of claim 125.

154.-162. (canceled)

163. A combination comprising:
(a) a first antibody comprising a TNF-like ligand 1A (TL1A) antigen-binding domain comprising a variable heavy domain (VH1) and a variable light domain (VL1); and
(b) a second antibody comprising an interleukin-23 (IL23) antigen-binding domain comprising a variable heavy domain (VH2) and a variable light domain (VL2).

164.-197. (canceled)

198. A bispecific antibody comprising:
(a) a first monomer comprising a first heavy chain comprising a VH1-CH1-hinge-CH2-CH3, wherein VH1 is a first variable heavy domain, CH1-hinge-CH2-CH3 is a first heavy chain constant domain, and CH2-CH3 is a first Fc domain;
(b) a second monomer comprising a second heavy chain comprising a VH2-CH1-hinge-CH2-CH3, wherein VH2 is a second variable domain, CH1-hinge-CH2-CH3 is a second heavy chain constant domain, and CH2-CH3 is a second Fc domain;
(c) a first light chain comprising a VL1-CL, wherein VL1 is a first variable light domain, and CL is a first light chain constant domain; and
(d) a second light chain comprising a VL2-CL, wherein VL2 is a second variable light domain, and CL is a second light chain constant domain,
wherein the VH1 and VL1 together form a first antigen-binding domain (ABD), and the VH2 and the VL2 together form a second ABD,
wherein the first ABD is a TL1A-binding domain and the second ABD is an IL23-binding domain, or wherein the first ABD is an IL23-binding domain and the second ABD is a TL1A-binding domain, and wherein:
(i) the first heavy chain constant domain and the first light chain constant domain comprise a set of electrostatic steering variants at positions 213 and 218 of the first heavy chain constant domain according to EU numbering and positions 122 and 123 of the first light chain constant domain according to Kabat numbering, or
a set of steric skew variants at position 141 of the first heavy chain constant domain according to EU numbering and position 118 of the first light chain constant domain according to Kabat numbering, at position 141 of the first heavy chain constant domain according to EU numbering and position 116 of the first light chain constant domain according to Kabat numbering, or at position 147 of the first heavy chain constant domain according to EU numbering and position 131 of the first light chain constant domain according to Kabat numbering; and/or
(ii) the VH1 and the VL1 comprise a set of electrostatic steering variants at position 39 of VH1 and position 38 of VL1 according to Kabat numbering; and/or
(iii) the second heavy chain constant domain and the second light chain constant domain comprise a set of electrostatic steering variants at positions 213 and 218 of the second heavy chain constant domain according to EU numbering and positions 122 and 123 of the second light chain constant domain according to Kabat numbering, or
a set of steric skew variants at position 141 of the second heavy chain constant domain according to EU numbering and position 118 of the second light chain constant domain according to Kabat numbering, at position 141 of the second heavy chain constant domain according to EU numbering and position 116 of the second light chain constant domain according to Kabat numbering, or at position 147 of the second heavy chain constant domain according to EU numbering and position 131 of the second light chain constant domain according to Kabat numbering; and/or
(iv) the VH2 and the VL2 comprise a set of electrostatic steering variants at position 39 of VH2 and position 38 of VL2 according to Kabat numbering.

199. A pharmaceutical composition comprising the bispecific antibody of claim 198 and a pharmaceutically acceptable carrier.

200. A kit, vessel, or delivery device comprising the bispecific antibody of claim 198.

201. A nucleic acid composition comprising a nucleic acid or a set of nucleic acids encoding the bispecific antibody of claim 198.

202. A host cell comprising the nucleic acid composition of claim 201.

203. A method of making a bispecific antibody, comprising culturing the host cell of claim 202 under conditions wherein the bispecific antibody is expressed, and recovering the bispecific antibody.

204. A method of inhibiting or reducing TL1A-mediated activity and/or IL23-mediated activity in a subject in need thereof, comprising administering to the subject the bispecific antibody of claim 198.

205. A method of treating a TL1A-associated disease and/or IL23-associated disease in a subject in need thereof, comprising administering to the subject the bispecific antibody of claim 198.

206. A bispecific antibody comprising:
(a) a first monomer comprising a first heavy chain comprising a VL1-CH1-hinge-CH2-CH3, wherein VL1 is a first variable light domain, CH1-hinge-CH2-CH3 is a first heavy chain constant domain, and CH2-CH3 is a first Fc domain;
(b) a second monomer comprising a second heavy chain comprising a VH2-CH1-hinge-CH2-CH3, wherein VH2 is a second variable heavy domain, CH1-hinge-CH2-CH3 is a second heavy chain constant domain, and CH2-CH3 is a second Fc domain;
(c) a first light chain comprising a VH1-CL, wherein VH1 is a first variable heavy domain, and CL is a first light chain constant domain; and
(d) a second light chain comprising a VL2-CL, wherein VL2 is a second variable light domain, and CL is a second light chain constant domain,
wherein the VH1 and VL1 together form a first antigen-binding domain (ABD), and the VH2 and the VL2 together form a second ABD,
wherein the first ABD is a TL1A-binding domain and the second ABD is an IL23-binding domain, or wherein the first ABD is an IL23-binding domain and the second ABD is a TL1A-binding domain.

207. A bispecific antibody comprising:
(a) a means for binding TL1A; and
(b) a means for binding IL23.

208. A kit, vessel, or delivery device comprising the bispecific antibody of claim 207.

209. A nucleic acid composition comprising a nucleic acid or a set of nucleic acids encoding the bispecific antibody of claim 207.

210. A host cell comprising the nucleic acid composition of claim 209.

211. A method of making a bispecific antibody, comprising culturing the host cell of claim 210 under conditions wherein the bispecific antibody is expressed, and recovering the bispecific antibody.

212. A method of inhibiting or reducing TL1A-mediated activity and/or IL23-mediated activity in a subject in need thereof, comprising administering to the subject the bispecific antibody of claim 207.

213. A method of treating a TL1A-associated disease and/or IL23-associated disease in a subject in need thereof, comprising administering to the subject the bispecific antibody of claim 207.

214. A pharmaceutical composition comprising:
(a) a first composition comprising a means for binding TL1A; and
(b) a second composition comprising a means for binding IL23.

215. A pharmaceutical composition comprising:
(a) a means for binding TL1A;
(b) a means for binding IL23; and
(c) a pharmaceutically acceptable carrier.
